(19) United States
(12) Patent Application Publication
(10) Pub. No.: US 2005/0214844 A1
(43) Pub. Date: Sep. 29, 2005

(54) 86 human secreted proteins

(75) Inventors: Paul A. Moore, North Bethesda, MD (US); Yanggu Shi, Gaithersburg, MD (US); Craig A. Rosen, Laytonsville, MD (US); Steven M. Ruben, Brookeville, MD (US); David W. Lafleur, Washington, DC (US); Henrik S. Olsen, Gaithersburg, MD (US); Reinhard Ebner, Gaithersburg, MD (US); Laurie A. Brewer, St. Paul, MN (US); Paul E. Young, Gaithersburg, MD (US); John M. Greene, Gaithersburg, MD (US); Ann M. Ferrie, Painted Post, NY (US); Guo-Liang Yu, Berkeley, CA (US); Jian Ni, Germantown, MD (US); Ping Feng, Germantown, MD (US)

Correspondence Address: HUMAN GENOME SCIENCES INC;INTELLECTUAL PROPERTY DEPT., 14200 SHADY GROVE ROAD, ROCKVILLE, MD, 20850, US

(73) Assignee: Human Genome Sciences, Inc., Rockville, MD (US)

(21) Appl. No.: 11/111,953

(22) Filed: Apr. 22, 2005

Related U.S. Application Data
(63) Continuation of application No. 10/219,793, filed on Aug. 16, 2002.
Application No. 10/219,793 is a continuation of application No. 09/209,462, filed on Dec. 11, 1998, now abandoned.
Application No. 09/209,462 is a continuation-in-part of application No. PCT/US98/12125, filed on Jun. 11, 1998.
(60) Provisional application No. 60/049,547, filed on Jun. 13, 1997.
(60) Provisional application No. 60/049,548, filed on Jun. 13, 1997.
(60) Provisional application No. 60/049,549, filed on Jun. 13, 1997.
(60) Provisional application No. 60/049,550, filed on Jun. 13, 1997.
(60) Provisional application No. 60/049,566, filed on Jun. 13, 1997.
(60) Provisional application No. 60/049,606, filed on Jun. 13, 1997.
(60) Provisional application No. 60/049,607, filed on Jun. 13, 1997.
(60) Provisional application No. 60/049,608, filed on Jun. 13, 1997.
(60) Provisional application No. 60/049,609, filed on Jun. 13, 1997.
(60) Provisional application No. 60/049,610, filed on Jun. 13, 1997.
(60) Provisional application No. 60/049,611, filed on Jun. 13, 1997.
(60) Provisional application No. 60/050,901, filed on Jun. 13, 1997.
(60) Provisional application No. 60/052,989, filed on Jun. 13, 1997.
(60) Provisional application No. 60/051,919, filed on Jul. 8, 1997.
(60) Provisional application No. 60/055,984, filed on Aug. 18, 1997.
(60) Provisional application No. 60/058,665, filed on Sep. 12, 1997.
(60) Provisional application No. 60/058,668, filed on Sep. 12, 1997.
(60) Provisional application No. 60/058,669, filed on Sep. 12, 1997.
(60) Provisional application No. 60/058,750, filed on Sep. 12, 1997.
(60) Provisional application No. 60/058,971, filed on Sep. 12, 1997.
(60) Provisional application No. 60/058,972, filed on Sep. 12, 1997.
(60) Provisional application No. 60/058,975, filed on Sep. 12, 1997.
(60) Provisional application No. 60/060,834, filed on Oct. 2, 1997.
(60) Provisional application No. 60/060,841, filed on Oct. 2, 1997.
(60) Provisional application No. 60/060,844, filed on Oct. 2, 1997.
(60) Provisional application No. 60/060,865, filed on Oct. 2, 1997.
(60) Provisional application No. 60/061,059, filed on Oct. 2, 1997.
(60) Provisional application No. 60/061,060, filed on Oct. 2, 1997.

(51) Int. Cl. C12Q 1/68; C07H 21/04; C12N 9/00; C12N 15/09; C07K 14/47; C07K 16/18

(52) U.S. Cl. 435/6; 435/69.1; 435/183; 435/320.1; 435/325; 530/350; 536/23.2; 530/388.1

(57) ABSTRACT

The present invention relates to novel human secreted proteins and isolated nucleic acids containing the coding regions of the genes encoding such proteins. Also provided are vectors, host cells, antibodies, and recombinant methods for producing human secreted proteins. The invention further relates to diagnostic and therapeutic methods useful for diagnosing and treating disorders related to these novel human secreted proteins.

### CROSS-REFERENCE TO RELATED APPLICATIONS

[0001] This application is a continuation of U.S. patent application Ser. No. 10/219,793, filed Aug. 16, 2002; which is a continuation of U.S. patent application Ser. No. 09/209,462, filed on Dec. 11, 1998; which is a continuation-in-part of United States Patent Application No. PCT/US98/12125, filed Jun. 11, 1998, which claims benefit under 35 U.S.C. § 119(e) based on U.S. Provisional Applications: 60/049,547, 60/049,548, 60/049,549, 60/049,550, 60/049,566, 60/049,606, 60/049,607, 60/049,608, 60/049,609, 60/049,610, 60/049,611, 60/050,901, and 60/052,989, filed Jun. 13, 1997; U.S. Provisional Application 60/051,919, filed Jul. 8, 1997; U.S. Provisional Application 60/055,984, filed Aug. 18, 1997; U.S. Provisional Application 60/058,665, 60/058,668, 60/058,669, 60/058,750, 60/058,971, 60/058,972, and 60/058,975, filed Sep. 12, 1997; and U.S. Provisional Application 60/060,834, 60/060,841, 60/060,844, 60/060,865, 60/061,059, and 60/061,060, filed Oct. 2, 1997. All above-mentioned Applications are hereby incorporated by reference.

### REFERENCE TO SEQUENCE LISTING ON COMPACT DISC

[0002] This application refers to a “Sequence Listing” listed below, which is provided as an electronic document on two identical compact discs (CD-R), labeled “Copy 1” and “Copy 2.” These compact discs each contain the file “PZ008P1C2 SeqList.txt” (created Apr. 12, 2005, byte size=579,231 bytes), which is hereby incorporated by reference in its entirety.

### FIELD OF THE INVENTION

[0003] This invention relates to newly identified polynucleotides and the polypeptides encoded by these polynucleotides, uses of such polynucleotides and polypeptides, and their production.

### BACKGROUND OF THE INVENTION

[0004] Unlike bacterium, which exist as a single compartment surrounded by a membrane, human cells and other eukaryotes are subdivided by membranes into many functionally distinct compartments. Each membrane-bounded compartment, or organelle, contains different proteins essential for the function of the organelle. The cell uses “sorting signals,” which are amino acid motifs located within the protein, to target proteins to particular cellular organelles.

[0005] One type of sorting signal, called a signal sequence, a signal peptide, or a leader sequence, directs a class of proteins to an organelle called the endoplasmic reticulum (ER). The ER separates the membrane-bounded proteins from all other types of proteins. Once localized to the ER, both groups of proteins can be further directed to another organelle called the Golgi apparatus. Here, the Golgi distributes the proteins to vesicles, including secretory vesicles, the cell membrane, lysosomes, and the other organelles.

[0006] Proteins targeted to the ER by a signal sequence can be released into the extracellular space as a secreted protein. For example, vesicles containing secreted proteins can fuse with the cell membrane and release their contents into the extracellular space—a process called exocytosis. Exocytosis can occur constitutively or after receipt of a triggering signal. In the latter case, the proteins are stored in secretory vesicles (or secretory granules) until exocytosis is triggered. Similarly, proteins residing on the cell membrane can also be secreted into the extracellular space by proteolytic cleavage of a “linker” holding the protein to the membrane.

[0007] Despite the great progress made in recent years, only a small number of genes encoding human secreted proteins have been identified. These secreted proteins include the commercially valuable human insulin, interferon, Factor VIII, human growth hormone, tissue plasminogen activator, and erythropoietin. Thus, in light of the pervasive role of secreted proteins in human physiology, a need exists for identifying and characterizing novel human secreted proteins and the genes that encode them. This knowledge will allow one to detect, to treat, and to prevent medical disorders by using secreted proteins or the genes that encode them.

### SUMMARY OF THE INVENTION

[0008] The present invention relates to novel polynucleotides and the encoded polypeptides. Moreover, the present invention relates to vectors, host cells, antibodies, and recombinant methods for producing the polypeptides and polynucleotides. Also provided are diagnostic methods for detecting disorders related to the polypeptides, and therapeutic methods for treating such disorders. The invention further relates to screening methods for identifying binding partners of the polypeptides.

### DETAILED DESCRIPTION

Definitions

[0009] The following definitions are provided to facilitate understanding of certain terms used throughout this specification.

[0010] In the present invention, “isolated” refers to material removed from its original environment (e.g., the natural environment if it is naturally occurring), and thus is altered “by the hand of man” from its natural state. For example, an isolated polynucleotide could be part of a vector or a composition of matter, or could be contained within a cell, and still be “isolated” because that vector, composition of matter, or particular cell is not the original environment of the polynucleotide.

[0011] In the present invention, a “secreted” protein refers to those proteins capable of being directed to the ER, secretory vesicles, or the extracellular space as a result of a signal sequence, as well as those proteins released into the extracellular space without necessarily containing a signal sequence. If the secreted protein is released into the extracellular space, the secreted protein can undergo extracellular processing to produce a “mature” protein. Release into the extracellular space can occur by many mechanisms, including exocytosis and proteolytic cleavage.

[0012] As used herein, a “polynucleotide” refers to a molecule having a nucleic acid sequence contained in SEQ ID NO:X or the cDNA contained within the clone deposited with the ATCC™. For example, the polynucleotide can contain the nucleotide sequence of the full length cDNA sequence, including the 5′ and 3′ untranslated sequences, the coding region, with or without the signal sequence, the secreted protein coding region, as well as fragments, epitopes, domains, and variants of the nucleic acid sequence. Moreover, as used herein, a “polypeptide” refers to a molecule having the translated amino acid sequence generated from the polynucleotide as broadly defined.

[0013] In the present invention, the full length sequence identified as SEQ ID NO:X was often generated by overlapping sequences contained in multiple clones (contig analysis). A representative clone containing all or most of the sequence for SEQ ID NO:X was deposited with the American Type Culture Collection (“ATCC™”). As shown in Table 1, each clone is identified by a cDNA Clone ID (Identifier) and the ATCC™ Deposit Number. The ATCC™ is located at 10801 University Boulevard, Manassas, Va. 20110-2209, USA. The ATCC™ deposit was made pursuant to the terms of the Budapest Treaty on the international recognition of the deposit of microorganisms for purposes of patent procedure.

[0014] A “polynucleotide” of the present invention also includes those polynucleotides capable of hybridizing, under stringent hybridization conditions, to sequences contained in SEQ ID NO:X, the complement thereof, or the cDNA within the clone deposited with the ATCC™. “Stringent hybridization conditions” refers to an overnight incubation at 42° C. in a solution comprising 50% formamide, 5× SSC (750 mM NaCl, 75 mM sodium citrate), 50 mM sodium phosphate (pH 7.6), 5× Denhardt's solution, 10% dextran sulfate, and 20 μg/ml denatured, sheared salmon sperm DNA, followed by washing the filters in 0.1× SSC at about 65° C.

[0015] Also contemplated are nucleic acid molecules that hybridize to the polynucleotides of the present invention at lower stringency hybridization conditions. Changes in the stringency of hybridization and signal detection are primarily accomplished through the manipulation of formamide concentration (lower percentages of formamide result in lowered stringency); salt conditions, or temperature. For example, lower stringency conditions include an overnight incubation at 37° C. in a solution comprising 6× SSPE (20× SSPE=3M NaCl; 0.2M NaH₂PO₄; 0.02M EDTA, pH 7.4), 0.5% SDS, 30% formamide, 100 ug/ml salmon sperm blocking DNA; followed by washes at 50° C. with 1×SSPE, 0.1% SDS. In addition, to achieve even lower stringency, washes performed following stringent hybridization can be done at higher salt concentrations (e.g. 5× SSC).

[0016] Note that variations in the above conditions may be accomplished through the inclusion and/or substitution of alternate blocking reagents used to suppress background in hybridization experiments. Typical blocking reagents include Denhardt's reagent, BLOTTO, heparin, denatured salmon sperm DNA, and commercially available proprietary formulations. The inclusion of specific blocking reagents may require modification of the hybridization conditions described above, due to problems with compatibility.

[0017] Of course, a polynucleotide which hybridizes only to polyA+ sequences (such as any 3′ terminal polyA+ tract of a cDNA shown in the sequence listing), or to a complementary stretch of T (or U) residues, would not be included in the definition of “polynucleotide,” since such a polynucleotide would hybridize to any nucleic acid molecule containing a poly (A) stretch or the complement thereof (e.g., practically any double-stranded cDNA clone).

[0018] The polynucleotide of the present invention can be composed of any polyribonucleotide or polydeoxyribonucleotide, which may be unmodified RNA or DNA or modified RNA or DNA. For example, polynucleotides can be composed of single- and double-stranded DNA, DNA that is a mixture of single- and double-stranded regions, single- and double-stranded RNA, and RNA that is mixture of single- and double-stranded regions, hybrid molecules comprising DNA and RNA that may be single-stranded or, more typically, double-stranded or a mixture of single- and double-stranded regions. In addition, the polynucleotide can be composed of triple-stranded regions comprising RNA or DNA or both RNA and DNA. A polynucleotide may also contain one or more modified bases or DNA or RNA backbones modified for stability or for other reasons. “Modified” bases include, for example, tritylated bases and unusual bases such as inosine. A variety of modifications can be made to DNA and RNA; thus, “polynucleotide” embraces chemically, enzymatically, or metabolically modified forms.

[0019] The polypeptide of the present invention can be composed of amino acids joined to each other by peptide bonds or modified peptide bonds, i.e., peptide isosteres, and may contain amino acids other than the 20 gene-encoded amino acids. The polypeptides may be modified by either natural processes, such as posttranslational processing, or by chemical modification techniques which are well known in the art. Such modifications are well described in basic texts and in more detailed monographs, as well as in a voluminous research literature. Modifications can occur anywhere in a polypeptide, including the peptide backbone, the amino acid side-chains and the amino or carboxyl termini. It will be appreciated that the same type of modification may be present in the same or varying degrees at several sites in a given polypeptide. Also, a given polypeptide may contain many types of modifications. Polypeptides may be branched, for example, as a result of ubiquitination, and they may be cyclic, with or without branching. Cyclic, branched, and branched cyclic polypeptides may result from posttranslation natural processes or may be made by synthetic methods. Modifications include acetylation, acylation, ADP-ribosylation, amidation, covalent attachment of flavin, covalent attachment of a heme moiety, covalent attachment of a nucleotide or nucleotide derivative, covalent attachment of a lipid or lipid derivative, covalent attachment of phosphotidylinositol, cross-linking, cyclization, disulfide bond formation, demethylation, formation of covalent cross-links, formation of cysteine, formation of pyroglutamate, formylation, gamma-carboxylation, glycosylation, GPI anchor formation, hydroxylation, iodination, methylation, myristoylation, oxidation, pegylation, proteolytic processing, phosphorylation, prenylation, racemization, selenoylation, sulfation, transfer-RNA mediated addition of amino acids to proteins such as arginylation, and ubiquitination. (See, for instance, PROTEINS—STRUCTURE AND MOLECULAR PROPERTIES, 2nd Ed., T. E. Creighton, W.H. Freeman and Company, New York (1993); POSTTRANSLATIONAL COVALENT MODIFICATION OF PROTEINS, B. C. Johnson, Ed., Academic Press, New York, pgs. 1-12 (1983); Seifter et al., Meth Enzymol 182: 626-646 (1990); Rattan et al., Ann NY Acad Sci 663: 48-62 (1992).)

[0020] “SEQ ID NO:X” refers to a polynucleotide sequence while “SEQ ID NO:Y” refers to a polypeptide sequence, both sequences identified by an integer specified in Table 1.

[0021] “A polypeptide having biological activity” refers to polypeptides exhibiting activity similar, but not necessarily identical to, an activity of a polypeptide of the present invention, including mature forms, as measured in a particular biological assay, with or without dose dependency. In the case where dose dependency does exist, it need not be identical to that of the polypeptide, but rather substantially similar to the dose-dependence in a given activity as compared to the polypeptide of the present invention (i.e., the candidate polypeptide will exhibit greater activity or not more than about 25-fold less and, preferably, not more than about tenfold less activity, and most preferably, not more than about three-fold less activity relative to the polypeptide of the present invention.)

Polynucleotides and Polypeptides of the Invention

Features of Protein Encoded by Gene No: 1

[0022] The translation product of this gene shares sequence homology with LIM-homeobox domain proteins, such as T-cell translocation protein, which are thought to be important in development and leukemogenesis. In addition, the translation product of this gene shares homology with the human breast tumor autoantigen (See Genbank Accession No. gi|1914877). In specific embodiments, polypeptides of the invention comprise the following amino acid sequence:

| | |
|---|---|
| MNGSHKDPLLPFPASARTPSLPPAPPAQAPLPWKPSGFARISPPPPLAILQYRGKADHGESGQQLAAAPGDGRLPLLEAVRRLRGQ | (SEQ ID NO:221) |
| DCGPLSALCHGQLLAQPVPQVLLLPGAXGDIGTSCYTKSGMILCRNDYIRLFGNSGACSACGQSIPASELVMRAQGNVYHLKCFTC | |
| STCRNRLVPGDRFHYINGSLFCEHDRPTALINGHLNSLQSNPLLPDQKVCKVRVMQNACLHLRFVHHRWIPCXFSRQVTFVASTSA | |
| SSMPLHLL, | |
| MARTRTPSSPFLLLRELPPSLQLRQPRRPFPGSRAASLAFHRRRLSQYCNIGEKQTMVNPGSSSQPPPVTAGSLSWKRCAGCGGKI | (SEQ ID NO:222) |
| ADRFLLYA, | |
| LFGNSGACSACGQSIPASELVMRA, | (SEQ ID NO:223) |
| HDRPTALINGHLNSLQSNP, | (SEQ ID NO:224) |
| and/or | |
| LVPGDRFHYING. | (SEQ ID NO:225) |

[0023] This gene is expressed primarily in fetal brain, osteosarcoma, IL-1/TNF treated synovial, and estradiol treated endometrial stromal cells, and to a lesser extent in chondrosarcoma and smooth muscle. Therefore, polynucleotides and polypeptides of the invention are useful as reagents for differential identification of the tissue(s) or cell type(s) present in a biological sample and for diagnosis of diseases and conditions which include, but are not limited to, developmental defects or leukemia. Similarly, polypeptides and antibodies directed to these polypeptides are useful in providing immunological probes for differential identification of the tissue(s) or cell type(s). For a number of disorders of the above tissues or cells, particularly of the hematopoietic system and immune system, expression of this gene at significantly higher or lower levels may be routinely detected in certain tissues or cell types (e.g., immune, cancerous and wounded tissues) or bodily fluids (e.g., lymph, serum, plasma, urine, synovial fluid and spinal fluid) or another tissue or cell sample taken from an individual having such a disorder, relative to the standard gene expression level, i.e., the expression level in healthy tissue or bodily fluid from an individual not having the disorder. Preferred epitopes include those comprising a sequence shown in SEQ ID NO. 116 as residues: Pro-4 to Pro-11, Asp-40 to Cys-47. The tissue distribution in fetal brain and stromal cells, combined with the homology to the LIM-homeodomain containing proteins, such as T-cell translocation factor, indicates that polynucleotides and polypeptides corresponding to this gene are useful for the diagnosis and intervention of leukemia and other developmental defects. Because of the importance of the LIM-homeodomain proteins in development and their correlation to a number of leukemic diseases, the molecule can be either used as a diagnositic or prognostic indicator for leukemia progression or a therapeutic target. In addition, polynucleotides and polypeptides corresponding to this gene are useful for the detection/treatment of neurodegenerative disease states and behavioral disorders such as Alzheimers Disease, Parkinsons Disease, Huntingtons Disease, schizophrenia, mania, dementia, paranoia, obsessive compulsive disorder, panic disorder, and autism. In addition, the gene or gene product may also play a role in the treatment and/or detection of developmental disorders associated with the developing embryo, sexually-linked disorders, or disorders of the cardiovascular system. Furthermore, homology to the breast auto-antigen may suggest that this gene is useful in the detection, prevention, and or treatment of breast cancer and/or other proliferative disorders where expression is indicated. Protein, as well as, antibodies directed against the protein may show utility as a tissue-specific marker and/or immunotherapy target for the above listed tissues.

[0024] Many polynucleotide sequences, such as EST sequences, are publicly available and accessible through sequence databases. Some of these sequences are related to SEQ ID NO:11 and may have been publicly available prior to conception of the present invention. Preferably, such related polynucleotides are specifically excluded from the scope of the present invention. To list every related sequence is cumbersome. Accordingly, preferably excluded from the present invention are one or more polynucleotides comprising a nucleotide sequence described by the general formula of a-b, where a is any integer between 1 to 1373 of SEQ ID NO:11, b is an integer of 15 to 1387, where both a and b correspond to the positions of nucleotide residues shown in SEQ ID NO:11, and where b is greater than or equal to a+14.

Features of Protein Encoded by Gene No: 2

[0025] The translation product of this gene has homology to a highly conserved member of the human calpain family of proteases, Calpain large subunit 1 gene (See Genbank Accession No. T32454). Calpains are thought to play a defining role in protein regulation, particularly during development. In specific embodiments, polypeptides of the invention comprise the following amino acid sequence:

| | |
|---|---|
| MKYMGGCAKVMCKYYVILYQGLEYPLLXSGDPETSPPWILRADCIVLSSRNFHSNXGRLTINKIYVIGGGKYRGEVTNGAK, | (SEQ ID NO:226) |
| [sequence omitted], | (SEQ ID NO:227) |
| MVLLLLTVASYTVFWMIGDVLDILFLWNFEYTTLY, | (SEQ ID NO:228) |
| MELYNSLCPICYFSTVLTTTYYIYFVYSQSSXIRMKVP, | (SEQ ID NO:229) |
| MQIVIVLYCVRNKDKKKVCTCSVQTQFFFPIFPILGCLNGCRTQE, | (SEQ ID NO:230) |
| MKYMGGCAKVMCKYYVILYQGLEYPLLX, | (SEQ ID NO:231) |
| LEYPLLXSGDPETSPPWILRADCIVLSSRNFHSNX, | (SEQ ID NO:232) |
| RNFHSNXGRLTINKIYVIGGGKYRGEVTNGAK, | (SEQ ID NO:233) |
| and/or | |
| MLLLTILILLCNRTPELIP. | (SEQ ID NO:234) |

encoding these polypeptides are also encompassed by the invention.

[0026] This gene is expressed primarily in caudate nucleus, dermatofibrosarcoma protuberance and apoptotic T-cells, and to a lesser extent in eosinophils, brain and smooth muscle. Therefore, polynucleotides and polypeptides of the invention are useful as reagents for differential identification of the tissue(s) or cell type(s) present in a biological sample and for diagnosis of diseases and conditions which include, but are not limited to, neurodegenerative diseases or immune disorders. Similarly, polypeptides and antibodies directed to these polypeptides are useful in providing immunological probes for differential identification of the tissue(s) or cell type(s). For a number of disorders of the above tissues or cells, particularly of the nervous system or immune system, expression of this gene at significantly higher or lower levels may be routinely detected in certain tissues or cell types (e.g., neurodegenerative, immune, cancerous and wounded tissues) or bodily fluids (e.g., lymph, serum, plasma, urine, synovial fluid and spinal fluid) or another tissue or cell sample taken from an individual having such a disorder, relative to the standard gene expression level, i.e., the expression level in healthy tissue or bodily fluid from an individual not having the disorder. The tissue distribution in caudate nucleus and apoptic T-cells indicates that the protein product of this gene is useful for the detection or intervention of neurodegenerative diseases and behavioral disorders such as Alzheimers Disease, Parkinsons Disease, Huntinton's disease, schizophrenia, mania, dementia, paranoia, obsessive compulsive disorder, panic disorder or immune disorders, because the elevated level of the molecule in cells undergoing cell death may be the cause or consequence of these degenerative conditions. In addition, the gene or gene product may also play a role in the treatment and/or detection of developmental disorders associated with the developing embryo, or disorders of the cardiovascular system. Protein, as well as, antibodies directed against the protein may show utility as a tissue-specific marker and/or immunotherapy target for the above listed tissues.

[0027] Many polynucleotide sequences, such as EST sequences, are publicly available and accessible through sequence databases. Some of these sequences are related to SEQ ID NO:12 and may have been publicly available prior to conception of the present invention. Preferably, such related polynucleotides are specifically excluded from the scope of the present invention. To list every related sequence is cumbersome. Accordingly, preferably excluded from the present invention are one or more polynucleotides comprising a nucleotide sequence described by the general formula of a-b, where a is any integer between 1 to 1925 of SEQ ID NO:12, b is an integer of 15 to 1939, where both a and b correspond to the positions of nucleotide residues shown in SEQ ID NO:12, and where b is greater than or equal to a+14.

Features of Protein Encoded by Gene No: 3

[0028] The gene encoding the disclosed cDNA is thought to reside on chromosome 15. Accordingly, polynucleotides related to this invention are useful as a marker in linkage analysis for chromosome 15. In specific embodiments, polypeptides of the invention comprise the following amino acid sequence:

| | |
|---|---|
| VTNEMSQGRGKYDFYIGLGLAMSSSIFIGGSFILKKKGLLRLARKGSMRAGQGGHAYLKEWLWWAGLLSMGAGEVANFAAYAFAPA | (SEQ ID NO:235) |
| TLVTPLGALSVLVSAILSSYFLNERLNLHGKIGCLLSILG STVMVIHAPKEEEIETLNE, | |
| VTNEMSQGRGKYDFYIGLGLAMSSSIFIGGSFILKKKGLLRLARKGSMRAGQGGHAYLKEWLWWAGLLSMGAGEVANF, | (SEQ ID NO:236) |
| NFAAYAFAPATLVTPLGALSVLVSAILSSY, | (SEQ ID NO:237) |
| and/or | |
| ERLNLHGKIGCLLSILGSTVMVIHAPKEEEIETLNE. | (SEQ ID NO:238) |

[0029] This gene is expressed primarily in colon carcinoma cell line, and to a lesser extent in aorta endothelial cells, T-cells, human erythroleukemia cells (HEL), and stromal cells (TF274). Therefore, polynucleotides and polypeptides of the invention are useful as reagents for differential identification of the tissue(s) or cell type(s) present in a biological sample and for diagnosis of diseases and conditions which include, but are not limited to, colon carcinoma. Similarly, polypeptides and antibodies directed to these polypeptides are useful in providing immunological probes for differential identification of the tissue(s) or cell type(s). For a number of disorders of the above tissues or cells, particularly of colon carcinoma tissues, expression of this gene at significantly higher or lower levels may be routinely detected in certain tissues or cell types (e.g., colon, cancerous and wounded tissues) or bodily fluids (e.g., lymph, serum, plasma, urine, synovial fluid and spinal fluid) or another tissue or cell sample taken from an individual having such a disorder, relative to the standard gene expression level, i.e., the expression level in healthy tissue or bodily fluid from an individual not having the disorder. Preferred epitopes include those comprising a sequence shown in SEQ ID NO. 118 as residues: Asn-191 to Ser-196, Asn-208 to Gly-214. The tissue distribution in colon carcinoma indicates that the protein product of this gene is useful for the detection and intervention of colon carcinoma and/or tumors of other tissues where expression is indicated. Additionally, the significant presence in T-cell populations may indicate the involvement of the function of the gene product in cancer immunosurveillance. Furthermore, the tissue distribution indicates that polynucleotides and polypeptides corresponding to this gene are useful for the diagnosis and treatment of cancer and other proliferative disorders, in general. The expression in hematopoietic cells and tissues indicates that this protein may play a role in the proliferation, differentiation, and/or survival of hematopoietic cell lineages. Thus, this gene may be useful in the treatment of lymphoproliferative disorders, and in the maintenance and differentiation of various hematopoietic lineages from early hematopoietic stem and committed progenitor cells. Protein, as well as, antibodies directed against the protein may show utility as a tissue-specific marker and/or immunotherapy target for the above listed tissues.

[0030] Many polynucleotide sequences, such as EST sequences, are publicly available and accessible through sequence databases. Some of these sequences are related to SEQ ID NO: 13 and may have been publicly available prior to conception of the present invention. Preferably, such related polynucleotides are specifically excluded from the scope of the present invention. To list every related sequence is cumbersome. Accordingly, preferably excluded from the present invention are one or more polynucleotides comprising a nucleotide sequence described by the general formula of a-b, where a is any integer between 1 to 2588 of SEQ ID NO:13, b is an integer of 15 to 2602, where both a and b correspond to the positions of nucleotide residues shown in SEQ ID NO:13, and where b is greater than or equal to a+14.

Features of Protein Encoded by Gene No: 4

[0031] This gene is expressed primarily in ovary. Therefore, polynucleotides and polypeptides of the invention are useful as reagents for differential identification of the tissue(s) or cell type(s) present in a biological sample and for diagnosis of diseases and conditions which include, but are not limited to, reproductive or endocrine disorders. Similarly, polypeptides and antibodies directed to these polypeptides are useful in providing immunological probes for differential identification of the tissue(s) or cell type(s). For a number of disorders of the above tissues or cells, particularly of the reproductive or endocrine systems, expression of this gene at significantly higher or lower levels may be routinely detected in certain tissues or cell types (e.g. reproductive, cancerous and wounded tissues) or bodily fluids (e.g., lymph, serum, plasma, urine, synovial fluid and spinal fluid) or another tissue or cell sample taken from an individual having such a disorder, relative to the standard gene expression level, i.e., the expression level in healthy tissue or bodily fluid from an individual not having the disorder. Preferred epitopes include those comprising a sequence shown in SEQ ID NO. 119 as residues: Pro-20 to Ser-25. The tissue distribution in ovary indicates that the protein product of this gene is useful for assessing reproductive dysfunction or endocrine disorders, because factors secreted by ovary may be involved in reproductive processes, and in such cases have global hormonal effects. Protein, as well as, antibodies directed against the protein may show utility as a tumor marker and/or immunotherapy targets for the above listed tissues.

[0032] Many polynucleotide sequences, such as EST sequences, are publicly available and accessible through sequence databases. Some of these sequences are related to SEQ ID NO:14 and may have been publicly available prior to conception of the present invention. Preferably, such related polynucleotides are specifically excluded from the scope of the present invention. To list every related sequence is cumbersome. Accordingly, preferably excluded from the present invention are one or more polynucleotides comprising a nucleotide sequence described by the general formula of a-b, where a is any integer between 1 to 794 of SEQ ID NO:14, b is an integer of 15 to 808, where both a and b correspond to the positions of nucleotide residues shown in SEQ ID NO:14, and where b is greater than or equal to a+14.

Features of Protein Encoded by Gene No: 5

[0033] In specific embodiments, polypeptides of the invention comprise the following amino acid sequence:

| | |
|---|---|
| PTAHLANPSPSTVNSGSAGPRPPAGAVVAAPGGALASVSFDSRDSKMAAQSAPKVVLKSTTKMSLNERFTNMLKNKQPTPVNIRAS | (SEQ ID NO:239) |
| MQQQQQLASARNRRLAQQMENRPSVQAALKLKQKSLKQRLGKSNIQARLGRPIGALARGAIGGRGLPIIQRGLPRGGLRGGRATRT | |
| LLRGGMSLRGQNLLRGGRAVAPRMGLRRGGVRGRGGPGRGGLGRGAMGRGGIGGRGRGMIGRGRGGFGGRGRGRGRGRGALARPVL | |
| TKEQLDNQLDAYMSKTKGHLDAELDAYMAQTDPETND, | |
| PPAGAVVAAPGGALASVSFDSRD, | (SEQ ID NO:240) |
| AQSAPKVVLKSTTKMSLNERFTNMLKNKQ, | (SEQ ID NO:241) |
| RNRRLAQQMENRPSVQAALKLKQ, | (SEQ ID NO:242) |
| GLPRGGLRGGRATRTLLRGGMSLRG, | (SEQ ID NO:243) |
| GGRAVAPRMGLRRGGVRGRGGPGR, | (SEQ ID NO:244) |
| RGMIGRGRGGFGGRGRGRGRGRGALA, | (SEQ ID NO:245) |
| and/or | |
| QLDNQLDAYMSKTKGHLDAELDAYMAQT. | (SEQ ID NO:246) |

Polynucleotides encoding these polypeptides are also encompassed by the invention.

[0034] The gene encoding the disclosed cDNA is thought to reside on chromosome 1. Accordingly, polynucleotides related to this invention are useful as a marker in linkage analysis for chromosome 1. This gene is expressed primarily in tissues in the central nervous system, including pineal gland, frontal cortex, and dura mater, and to a lesser extent in bladder, lung, T-cells and liver. Therefore, polynucleotides and polypeptides of the invention are useful as reagents for differential identification of the tissue(s) or cell type(s) present in a biological sample and for diagnosis of diseases and conditions which include, but are not limited to, neurodegenerative diseases, endocrine disorders, and immune disorders. Similarly, polypeptides and antibodies directed to these polypeptides are useful in providing immunological probes for differential identification of the tissue(s) or cell type(s). For a number of disorders of the above tissues or cells, particularly of the nervous and endocrine systems, expression of this gene at significantly higher or lower levels may be routinely detected in certain tissues or cell types (e.g., immune, endocrine, cancerous and wounded tissues) or bodily fluids (e.g., lymph, serum, plasma, urine, synovial fluid and spinal fluid) or another tissue or cell sample taken from an individual having such a disorder, relative to the standard gene expression level, i.e., the expression level in healthy tissue or bodily fluid from an individual not having the disorder. The primary tissue distribution in tissues of the central nervous system indicates that the protein product of this gene is useful for the detection and intervention of neurodegenerative diseases or endocrine disorders, because extracellular proteins in these tissues may function as a neurotrophic factor, a matrix protein for tissue integrity, a neuroguidance factor or as a hormone. Furthermore, the tissue distribution indicates that the protein product of this gene is useful for the detection, treatment, and/or prevention of various endocrine disorders and cancers, particularly Addison's disease, Cushing's Syndrome, and disorders and/or cancers of the pancreas (e.g. diabetes mellitus), adrenal cortex, ovaries, pituitary (e.g., hyper-, hypopituitarism), thyroid (e.g. hyper-, hypothyroidism), parathyroid (e.g. hyper-, hypoparathyroidism), hypothalamus, and testes. Additionally, the tissue distribution indicates that the protein product of this gene is useful for the detection/treatment of neurodegenerative disease states and behavioral disorders such as Alzheimers Disease, Parkinsons Disease, Huntingtons Disease, Tourette Syndrome, schizophrenia, mania, dementia, paranoia, obsessive compulsive disorder, panic disorder, learning disabilities, ALS, psychoses, autism, and altered behaviors, including disorders in feeding, sleep patterns, balance, and perception. In addition, the gene or gene product may also play a role in the treatment and/or detection of developmental disorders associated with the developing embryo, or sexually-linked disorders. Protein, as well as, antibodies directed against the protein may show utility as a tumor marker and/or immunotherapy targets for the above listed tissues.

[0035] Many polynucleotide sequences, such as EST sequences, are publicly available and accessible through sequence databases. Some of these sequences are related to SEQ ID NO:15 and may have been publicly available prior to conception of the present invention. Preferably, such related polynucleotides are specifically excluded from the scope of the present invention. To list every related sequence is cumbersome. Accordingly, preferably excluded from the present invention are one or more polynucleotides comprising a nucleotide sequence described by the general formula of a-b, where a is any integer between 1 to 2129 of SEQ ID NO:15, b is an integer of 15 to 2143, where both a and b correspond to the positions of nucleotide residues shown in SEQ ID NO:15, and where b is greater than or equal to a+14.

Features of Protein Encoded by Gene No: 6

[0036] The gene encoding the disclosed cDNA is thought to reside on chromosome 5. Accordingly, polynucleotides related to this invention are useful as a marker in linkage analysis for chromosome 5. This gene is expressed primarily in spleen, resting T-cells, colorectal tumor and pancreatic carcinoma, and to a lesser extent in a number of tissues including prostate, synovial hypoxia, osteosarcoma, ulcerative colitis, myeloid progenitor cells, lung and placenta. Therefore, polynucleotides and polypeptides of the invention are useful as reagents for differential identification of the tissue(s) or cell type(s) present in a biological sample and for diagnosis of diseases and conditions which include, but are not limited to, inflammation, immunosurveillance of cancers, and immune and gastrointestinal disorders. Similarly, polypeptides and antibodies directed to these polypeptides are useful in providing immunological probes for differential identification of the tissue(s) or cell type(s). For a number of disorders of the above tissues or cells, particularly in carcinogenesis or the immune system, expression of this gene at significantly higher or lower levels may be routinely detected in certain tissues or cell types (e.g., immune, gastrointestinal, cancerous and wounded tissues) or bodily fluids (e.g., lymph, serum, plasma, urine, synovial fluid and spinal fluid) or another tissue or cell sample taken from an individual having such a disorder, relative to the standard gene expression level, i.e., the expression level in healthy tissue or bodily fluid from an individual not having the disorder. Preferred epitopes include those comprising a sequence shown in SEQ ID NO. 121 as residues: Arg-29 to Pro-37, Gln-46 to Val-56. The primary tissue distribution in lymphatic tissues such as T-cells and spleen, as well as tumors and ulcerative tissues, indicates that the protein product of this gene is involved in the immuno-response to or immunosurveillance of carcinogenesis and/or inflammatory conditions. Protein, as well as, antibodies directed against the protein may show utility as a tumor marker and/or immunotherapy targets for the above listed tissues.

[0037] Many polynucleotide sequences, such as EST sequences, are publicly available and accessible through sequence databases. Some of these sequences are related to SEQ ID NO:16 and may have been publicly available prior to conception of the present invention. Preferably, such related polynucleotides are specifically excluded from the scope of the present invention. To list every related sequence is cumbersome. Accordingly, preferably excluded from the present invention are one or more polynucleotides comprising a nucleotide sequence described by the general formula of a-b, where a is any integer between 1 to 2347 of SEQ ID NO:16, b is an integer of 15 to 2361, where both a and b correspond to the positions of nucleotide residues shown in SEQ ID NO:16, and where b is greater than or equal to a+14.

Features of Protein Encoded by Gene No: 7

[0038] The translation product of this gene shares very weak sequence homology with voltage dependent sodium channel protein and Bowman-Birk proteinase inhibitor which is thought to be important in membrane signaling or extracellular signaling cascades (See Genbank Accession No. gnl|PID|d1020763 (AB000216)). The translation product of this gene also shares homology with Cca3, which is a rat liver protein thought to be involved in DNA synthesis (See Genbank Accession No. gnl|PID|g2104558 (AB000216)). In specific embodiments, polypeptides of the invention comprise the following amino acid sequence: RFKTLMTNKSEQDGDSSKTIEISDMKYHIFQ (SEQ ID NO:247), and/or LVEGKLFYAHKVLLVTXSNR (SEQ ID NO:248). Polynucleotides encoding these polypeptides are also encompassed by the invention.

[0039] This gene is expressed primarily in prostate cancer. Therefore, polynucleotides and polypeptides of the invention are useful as reagents for differential identification of the tissue(s) or cell type(s) present in a biological sample and for diagnosis of diseases and conditions which include, but are not limited to, prostate cancer. Similarly, polypeptides and antibodies directed to these polypeptides are useful in providing immunological probes for differential identification of the tissue(s) or cell type(s). For a number of disorders of the above tissues or cells, particularly of prostate cancer tissue, expression of this gene at significantly higher or lower levels may be routinely detected in certain tissues or cell types (e.g., prostate, cancerous and wounded tissues) or bodily fluids (e.g., lymph, serum, plasma, urine, synovial fluid and spinal fluid) or another tissue or cell sample taken from an individual having such a disorder, relative to the standard gene expression level, i.e., the expression level in healthy tissue or bodily fluid from an individual not having the disorder. Preferred epitopes include those comprising a sequence shown in SEQ ID NO. 122 as residues: Glu-30 to Ser-35. The tissue distribution in the prostate, combined with the homology to a sodium channel or proteinase inhibitor as well as Cca3 suggest that the protein product of this gene is useful for the intervention of cancer progression, because the gene product may be involved in multidrug resistance by altering the drug kinetics by serving the function as a channel transporter. Alternatively, the proteinase inhibitor like function may facilitate tumor metastasis. By targeting these functions, either through vaccine or small molecules, therapeutics may be rationally designed to slow the cancer progression. Protein, as well as, antibodies directed against the protein may show utility as a tumor marker and/or immunotherapy targets for the above listed tissues.

[0040] Many polynucleotide sequences, such as EST sequences, are publicly available and accessible through sequence databases. Some of these sequences are related to SEQ ID NO:17 and may have been publicly available prior to conception of the present invention. Preferably, such related polynucleotides are specifically excluded from the scope of the present invention. To list every related sequence is cumbersome. Accordingly, preferably excluded from the present invention are one or more polynucleotides comprising a nucleotide sequence described by the general formula of a-b, where a is any integer between 1 to 789 of SEQ ID NO:17, b is an integer of 15 to 803, where both a and b correspond to the positions of nucleotide residues shown in SEQ ID NO:17, and where b is greater than or equal to a+14.

Features of Protein Encoded by Gene No: 8

[0041] In specific embodiments, polypeptides of the invention comprise the following amino acid sequence: MTVKPCLVFSCAFGLLVSRLS (SEQ ID NO:249). Polynucleotides encoding these polypeptides are also encompassed by the invention. This gene is expressed primarily in ovary, and to a lesser extent in the adrenal gland. Therefore, polynucleotides and polypeptides of the invention are useful as reagents for differential identification of the tissue(s) or cell type(s) present in a biological sample and for diagnosis of diseases and conditions which include, but are not limited to, female infertility and endocrine disorders. Similarly, polypeptides and antibodies directed to these polypeptides are useful in providing immunological probes for differential identification of the tissue(s) or cell type(s). For a number of disorders of the above tissues or cells, particularly of the female reproductive system and the endocrine system, expression of this gene at significantly higher or lower levels may be routinely detected in certain tissues or cell types (e.g., endocrine, reproductive, cancerous and wounded tissues) or bodily fluids (e.g., lymph, serum, plasma, urine, synovial fluid and spinal fluid) or another tissue or cell sample taken from an individual having such a disorder, relative to the standard gene expression level, i.e., the expression level in healthy tissue or bodily fluid from an individual not having the disorder. The tissue distribution of this gene in ovary and adrenal gland indicates that the protein product of this gene is useful for the treatment/diagnosis of female infertility, endocrine disorders, ovarian function, amenorrhea, ovarian cancer and metabolic disorders. Protein, as well as, antibodies directed against the protein may show utility as a tumor marker and/or immunotherapy targets for the above listed tissues.

[0042] Many polynucleotide sequences, such as EST sequences, are publicly available and accessible through sequence databases. Some of these sequences are related to SEQ ID NO:18 and may have been publicly available prior to conception of the present invention. Preferably, such related polynucleotides are specifically excluded from the scope of the present invention. To list every related sequence is cumbersome. Accordingly, preferably excluded from the present invention are one or more polynucleotides comprising a nucleotide sequence described by the general formula of a-b, where a is any integer between 1 to 1780 of SEQ ID NO:18, b is an integer of 15 to 1794, where both a and b correspond to the positions of nucleotide residues shown in SEQ ID NO:18, and where b is greater than or equal to a+14.

Features of Protein Encoded by Gene No: 9

[0043] This gene is expressed only in prostate cancer. Therefore, polynucleotides and polypeptides of the invention are useful as reagents for differential identification of the tissue(s) or cell type(s) present in a biological sample and for diagnosis of diseases and conditions which include, but are not limited to, prostate disorders including cancer. Similarly, polypeptides and antibodies directed to these polypeptides are useful in providing immunological probes for differential identification of the tissue(s) or cell type(s). For a number of disorders of the above tissues or cells, particularly of the endocrine and male reproductive system, expression of this gene at significantly higher or lower levels may be routinely detected in certain tissues or cell types (e.g., prostate, endocrine, cancerous and wounded tissues) or bodily fluids (e.g., lymph, serum, plasma, urine, synovial fluid and spinal fluid) or another tissue or cell sample taken from an individual having such a disorder, relative to the standard gene expression level, i.e., the expression level in healthy tissue or bodily fluid from an individual not having the disorder. The tissue distribution of this gene only in prostate cancerous tissue indicates that the protein product of this gene is useful for the treatment/diagnosis of male infertility, metabolic disorders, and prostate disorders including benign prostate hyperplasia and prostate cancer. Protein, as well as, antibodies directed against the protein may show utility as a tumor marker and/or immunotherapy targets for the above listed tissues.

[0044] Many polynucleotide sequences, such as EST sequences, are publicly available and accessible through sequence databases. Some of these sequences are related to SEQ ID NO:19 and may have been publicly available prior to conception of the present invention. Preferably, such related polynucleotides are specifically excluded from the scope of the present invention. To list every related sequence is cumbersome. Accordingly, preferably excluded from the present invention are one or more polynucleotides comprising a nucleotide sequence described by the general formula of a-b, where a is any integer between 1 to 1023 of SEQ ID NO:19, b is an integer of 15 to 1037, where both a and b correspond to the positions of nucleotide residues shown in SEQ ID NO:19, and where b is greater than or equal to a+14.

Features of Protein Encoded by Gene No: 10

[0045] The gene encoding the disclosed cDNA is thought to reside on chromosome 5. Accordingly, polynucleotides related to this invention are useful as a marker in linkage analysis for chromosome 5. The translation product of this gene shares homology with HVH2, which is thought to be a dual specific phosphatase which may function in vivo as a MAP kinase phosphatase (Genbank Accession No. PID|g773355|accession U21108). This gene is expressed primarily in placenta, and to a lesser extent in ovary. Therefore, polynucleotides and polypeptides of the invention are useful as reagents for differential identification of the tissue(s) or cell type(s) present in a biological sample and for diagnosis of diseases and conditions which include, but are not limited to, female infertility, pregnancy disorders, developmental disorders, and ovarian cancer. Similarly, polypeptides and antibodies directed to these polypeptides are useful in providing immunological probes for differential identification of the tissue(s) or cell type(s). For a number of disorders of the above tissues or cells, particularly of the reproductive system and developing embryo, expression of this gene at significantly higher or lower levels may be routinely detected in certain tissues or cell types (e.g., reproductive, developmental, cancerous and wounded tissues) or bodily fluids (e.g., lymph, serum, plasma, urine, synovial fluid and spinal fluid) or another tissue or cell sample taken from an individual having such a disorder, relative to the standard gene expression level, i.e., the expression level in healthy tissue or bodily fluid from an individual not having the disorder. Preferred epitopes include those comprising a sequence shown in SEQ ID NO. 125 as residues: Gln-39 to Pro-65. The tissue distribution of this gene in placenta and ovary indicates that the protein product of this gene is useful for the treatment/diagnosis of female infertility, endocrine disorders, fetal deficiencies, ovarian failure, amenorrhea, and ovarian cancer. Furthermore, the tissue distribution indicates that the protein product of this gene is useful for the diagnosis and/or treatment of disorders of the placenta. Specific expression within the placenta indicates that this gene product may play a role in the proper establishment and maintenance of placental function. Alternately, this gene product may be produced by the placenta and then transported to the embryo, where it may play a crucial role in the development and/or survival of the developing embryo or fetus. Expression of this gene product in a vascular-rich tissue such as the placenta also indicates that this gene product may be produced more generally in endothelial cells or within the circulation. In such instances, it may play more generalized roles in vascular function, such as in angiogenesis. It may also be produced in the vasculature and have effects on other cells within the circulation, such as hematopoietic cells. It may serve to promote the proliferation, survival, activation, and/or differentiation of hematopoietic cells, as well as other cells throughout the body.

[0046] Many polynucleotide sequences, such as EST sequences, are publicly available and accessible through sequence databases. Some of these sequences are related to SEQ ID NO:20 and may have been publicly available prior to conception of the present invention. Preferably, such related polynucleotides are specifically excluded from the scope of the present invention. To list every related sequence is cumbersome. Accordingly, preferably excluded from the present invention are one or more polynucleotides comprising a nucleotide sequence described by the general formula of a-b, where a is any integer between 1 to 1259 of SEQ ID NO:20, b is an integer of 15 to 1273, where both a and b correspond to the positions of nucleotide residues shown in SEQ ID NO:20, and where b is greater than or equal to a+14.

Features of Protein Encoded by Gene No: 11

[0047] This gene shares homology with the gene for the Human 3′ apolipoprotein B SAR element gene Rh32 (See Genbank Accession No. T31530). This gene is expressed primarily in prostate and in the pancreas. Therefore, polynucleotides and polypeptides of the invention are useful as reagents for differential identification of the tissue(s) or cell type(s) present in a biological sample and for diagnosis of diseases and conditions which include, but are not limited to, prostate and pancreatic disorders. Similarly, polypeptides and antibodies directed to these polypeptides are useful in providing immunological probes for differential identification of the tissue(s) or cell type(s). For a number of disorders of the above tissues or cells, particularly of the endocrine system, expression of this gene at significantly higher or lower levels may be routinely detected in certain tissues or cell types (e.g., endocrine, cancerous and wounded tissues) or bodily fluids (e.g., lymph, serum, plasma, urine, synovial fluid and spinal fluid) or another tissue or cell sample taken from an individual having such a disorder, relative to the standard gene expression level, i.e., the expression level in healthy tissue or bodily fluid from an individual not having the disorder. The tissue distribution of this gene in prostate and pancreas indicates that the protein product of this gene is useful for the treatment/diagnosis of male infertility, prostate disorders including benign prostate hyperplasia, prostate cancer, pancreatic cancer, type I and type II diabetes and hypoglycemia. Homology to a known human apolipoprotein may suggest this gene is useful for the detection, prevention, or treatment of various metabolic disorders, particularly those secondary to lipoprotein disorders such as atherosclerosis, coronary heart disease, stroke, and hyperlipidemias. Furthermore, the tissue distribution indicates that the protein product of this gene is useful for the detection, treatment, and/or prevention of various endocrine disorders and cancers, particularly Addison's disease, Cushing's Syndrome, and disorders and/or cancers of the pancreas (e.g. diabetes mellitus), adrenal cortex, ovaries, pituitary (e.g., hyper-, hypopituitarism), thyroid (e.g. hyper-, hypothyroidism), parathyroid (e.g. hyper-, hypoparathyroidism), hypothalamus, and testes. Protein, as well as, antibodies directed against the protein may show utility as a tumor marker and/or immunotherapy targets for the above listed tissues.

[0048] Many polynucleotide sequences, such as EST sequences, are publicly available and accessible through sequence databases. Some of these sequences are related to SEQ ID NO:21 and may have been publicly available prior to conception of the present invention. Preferably, such related polynucleotides are specifically excluded from the scope of the present invention. To list every related sequence is cumbersome. Accordingly, preferably excluded from the present invention are one or more polynucleotides comprising a nucleotide sequence described by the general formula of a-b, where a is any integer between 1 to 1067 of SEQ ID NO:21, b is an integer of 15 to 1081, where both a and b correspond to the positions of nucleotide residues shown in SEQ ID NO:21, and where b is greater than or equal to a+14.

Features of Protein Encoded by Gene No: 12

[0049] This gene has homology to a conserved Beta-casein, which is an abundant milk protein (See Genbank Accession No. Q37894). This gene is expressed primarily in stomach, thyroid, and kidney. Therefore, polynucleotides and polypeptides of the invention are useful as reagents for differential identification of the tissue(s) or cell type(s) present in a biological sample and for diagnosis of diseases and conditions which include, but are not limited to, disorders of the digestive tract and/or mammary glands, endocrine disorders. Similarly, polypeptides and antibodies directed to these polypeptides are useful in providing immunological probes for differential identification of the tissue(s) or cell type(s). For a number of disorders of the above tissues or cells, particularly of the digestive system, breast, and endocrine disorders, expression of this gene at significantly higher or lower levels may be routinely detected in certain tissues or cell types (e.g., gastrointestinal, endocrine, mammary, cancerous and wounded tissues) or bodily fluids (e.g., lymph, serum, plasma, urine, synovial fluid and spinal fluid) or another tissue or cell sample taken from an individual having such a disorder, relative to the standard gene expression level, i.e., the expression level in healthy tissue or bodily fluid from an individual not having the disorder. The tissue distribution of this gene in stomach tissue indicates a role in the treatment/diagnosis of digestive disorders, including stomach cancer and ulceration. Furthermore, the homology to conserved beta-casein may indicate this gene as having utility in the diagnosis and prevention of mammary gland disorders, or other glands of the endocrine system, particularly the thyroid. Additionally, the tissue distribution indicates that the protein product of this gene is useful for the detection, treatment, and/or prevention of various endocrine disorders and cancers, particularly Addison's disease, Cushing's Syndrome, and disorders and/or cancers of the pancreas (e.g. diabetes mellitus), adrenal cortex, ovaries, pituitary (e.g., hyper-, hypopituitarism), thyroid (e.g. hyper-, hypothyroidism), parathyroid (e.g. hyper-, hypoparathyroidism), hypothalamus, and testes. Protein, as well as, antibodies directed against the protein may show utility as a tumor marker and/or immunotherapy targets for the above listed tissues.

[0050] Many polynucleotide sequences, such as EST sequences, are publicly available and accessible through sequence databases. Some of these sequences are related to SEQ ID NO:22 and may have been publicly available prior to conception of the present invention. Preferably, such related polynucleotides are specifically excluded from the scope of the present invention. To list every related sequence is cumbersome. Accordingly, preferably excluded from the present invention are one or more polynucleotides comprising a nucleotide sequence described by the general formula of a-b, where a is any integer between 1 to 793 of SEQ ID NO:22, b is an integer of 15 to 807, where both a and b correspond to the positions of nucleotide residues shown in SEQ ID NO:22, and where b is greater than or equal to a+14.

Features of Protein Encoded by Gene No: 13

[0051] This gene is expressed in brain and lung. Therefore, polynucleotides and polypeptides of the invention are useful as reagents for differential identification of the tissue(s) or cell type(s) present in a biological sample and for diagnosis of diseases and conditions which include, but are not limited to, neurodegenerative disease states, behavioral abnormalities and pulmonary disorders. Similarly, polypeptides and antibodies directed to these polypeptides are useful in providing immunological probes for differential identification of the tissue(s) or cell type(s). For a number of disorders of the above tissues or cells, particularly of the immune, nervous, and pulmonary systems, expression of this gene at significantly higher or lower levels may be routinely detected in certain tissues or cell types (e.g., brain, lung, cancerous and wounded tissues) or bodily fluids (e.g., lymph, serum, plasma, urine, synovial fluid and spinal fluid) or another tissue or cell sample taken from an individual having such a disorder, relative to the standard gene expression level, i.e., the expression level in healthy tissue or bodily fluid from an individual not having the disorder. The tissue distribution in brain and lung tissue indicates that the protein product of this gene is useful for the detection/treatment of neurodegenerative disease states and behavioral disorders such as Alzheimers Disease, Parkinsons Disease, Huntington's Disease, schizophrenia, mania, dementia, paranoia, obsessive compulsive disorder and panic disorder. In addition, it could be used in the detection and treatment of pulmonary disease states such as lung lymphoma or sarcoma formation, pulmonary edema and embolism, bronchitis, cystic fibrosis, and disorders associated with developing lungs, particularly in premature infants where the lungs are the last tissues to develop. Protein, as well as, antibodies directed against the protein may show utility as a tumor marker and immunotherapy targets for the above listed tumors and tissues.

[0052] Many polynucleotide sequences, such as EST sequences, are publicly available and accessible through sequence databases. Some of these sequences are related to SEQ ID NO:23 and may have been publicly available prior to conception of the present invention. Preferably, such related polynucleotides are specifically excluded from the scope of the present invention. To list every related sequence is cumbersome. Accordingly, preferably excluded from the present invention are one or more polynucleotides comprising a nucleotide sequence described by the general formula of a-b, where a is any integer between 1 to 618 of SEQ ID NO:23, b is an integer of 15 to 632, where both a and b correspond to the positions of nucleotide residues shown in SEQ ID NO:23, and where b is greater than or equal to a+14.

Features of Protein Encoded by Gene No: 14

[0053] In specific embodiments, polypeptides of the invention comprise the following amino acid sequence: IYTHKYYKFRESDQPQLFLFEVGERNQKSE (SEQ ID NO:250). Polynucleotides encoding these polypeptides are also encompassed by the invention.

[0054] This gene is expressed exclusively in T-cells. Therefore, polynucleotides and polypeptides of the invention are useful as reagents for differential identification of the tissue(s) or cell type(s) present in a biological sample and for diagnosis of diseases and conditions which include, but are not limited to, immune disorders. Similarly, polypeptides and antibodies directed to these polypeptides are useful in providing immunological probes for differential identification of the tissue(s) or cell type(s). For a number of disorders of the above tissues or cells, particularly of the immune system, expression of this gene at significantly higher or lower levels may be routinely detected in certain tissues or cell types (e.g., immune, cancerous and wounded tissues) or bodily fluids (e.g., lymph, serum, plasma, urine, synovial fluid and spinal fluid) or another tissue or cell sample taken from an individual having such a disorder, relative to the standard gene expression level, i.e., the expression level in healthy tissue or bodily fluid from an individual not having the disorder. The tissue distribution in T-cells indicates that the protein product of this gene is useful for the treatment/detection of immune disorders such as arthritis, asthma, immune deficiency diseases such as AIDS, and leukemia. Additionally, the expression in hematopoietic cells and tissues indicates that this protein may play a role in the proliferation, differentiation, and/or survival of hematopoietic cell lineages. Thus, this gene may be useful in the treatment of lymphoproliferative disorders, and in the maintenance and differentiation of various hematopoietic lineages from early hematopoietic stem and committed progenitor cells. Furthermore, this gene product may be involved in the regulation of cytokine production, antigen presentation, or other processes that may also suggest a usefulness in the treatment of cancer (e.g. by boosting immune responses). Expression of this gene product in T cells also strongly indicates a role for this protein in immune function and immune surveillance. Since the gene is expressed in cells of lymphoid origin, the gene or protein, as well as, antibodies directed against the protein may show utility as a tumor marker and/or immunotherapy targets for the above listed tissues.

[0055] Many polynucleotide sequences, such as EST sequences, are publicly available and accessible through sequence databases. Some of these sequences are related to SEQ ID NO:24 and may have been publicly available prior to conception of the present invention. Preferably, such related polynucleotides are specifically excluded from the scope of the present invention. To list every related sequence is cumbersome. Accordingly, preferably excluded from the present invention are one or more polynucleotides comprising a nucleotide sequence described by the general formula of a-b, where a is any integer between 1 to 1344 of SEQ ID NO:24, b is an integer of 15 to 1358, where both a and b correspond to the positions of nucleotide residues shown in SEQ ID NO:24, and where b is greater than or equal to a+14.

Features of Protein Encoded by Gene No: 15

[0056] In specific embodiments, polypeptides of the invention comprise the following amino acid sequence: NSLVRSVTEWCANVRGNPCAAALSCPQAVLDAGK (SEQ ID NO:251). Polynucleotides encoding these polypeptides are also encompassed by the invention.

[0057] This gene is expressed primarily in T-cells. Therefore, polynucleotides and polypeptides of the invention are useful as reagents for differential identification of the tissue(s) or cell type(s) present in a biological sample and for diagnosis of diseases and conditions which include, but are not limited to, immune disorders. Similarly, polypeptides and antibodies directed to these polypeptides are useful in providing immunological probes for differential identification of the tissue(s) or cell type(s). For a number of disorders of the above tissues or cells, particularly of the immune system, expression of this gene at significantly higher or lower levels may be routinely detected in certain tissues or cell types (e.g., immune, cancerous and wounded tissues) or bodily fluids (e.g., lymph, serum, plasma, urine, synovial fluid and spinal fluid) or another tissue or cell sample taken from an individual having such a disorder, relative to the standard gene expression level, i.e., the expression level in healthy tissue or bodily fluid from an individual not having the disorder. Preferred epitopes include those comprising a sequence shown in SEQ ID NO. 130 as residues: Ala-46 to Asp-51. The tissue distribution in T-cells indicates that the protein product of this gene is useful for the diagnosis and treatment of immune disorders including: leukemias, lymphomas, auto-immunities, immunodeficiencies (e.g. AIDS), immunosuppressive conditions (transplantation) and hematopoeitic disorders. Furthermore, this gene product may be involved in the regulation of cytokine production, antigen presentation, or other processes that may also suggest a usefulness in the treatment of cancer (e.g. by boosting immune responses). Expression of this gene product in T cells also strongly indicates a role for this protein in immune function and immune surveillance. Since the gene is expressed in cells of lymphoid origin, the gene or protein, as well as, antibodies directed against the protein may show utility as a tumor marker and/or immunotherapy targets for the above listed tissues.

[0058] Many polynucleotide sequences, such as EST sequences, are publicly available and accessible through sequence databases. Some of these sequences are related to SEQ ID NO:25 and may have been publicly available prior to conception of the present invention. Preferably, such related polynucleotides are specifically excluded from the scope of the present invention. To list every related sequence is cumbersome. Accordingly, preferably excluded from the present invention are one or more polynucleotides comprising a nucleotide sequence described by the general formula of a-b, where a is any integer between 1 to 1362 of SEQ ID NO:25, b is an integer of 15 to 1376, where both a and b correspond to the positions of nucleotide residues shown in SEQ ID NO:25, and where b is greater than or equal to a+14.

Features of Protein Encoded by Gene No: 16

[0059] This gene is expressed primarily in endometrial tumors. Therefore, polynucleotides and polypeptides of the invention are useful as reagents for differential identification of the tissue(s) or cell type(s) present in a biological sample and for diagnosis of diseases and conditions which include, but are not limited to, cancer, particularly endometrial. Similarly, polypeptides and antibodies directed to these polypeptides are useful in providing immunological probes for differential identification of the tissue(s) or cell type(s). For a number of disorders of the above tissues or cells, particularly of the female reproductive system, expression of this gene at significantly higher or lower levels may be routinely detected in certain tissues or cell types (e.g., reproductive, cancerous and wounded tissues) or bodily fluids (e.g., lymph, serum, plasma, urine, synovial fluid and spinal fluid) or another tissue or cell sample taken from an individual having such a disorder, relative to the standard gene expression level, i.e., the expression level in healthy tissue or bodily fluid from an individual not having the disorder. The tissue distribution in endometrial tumors indicates that the protein product of this gene is useful for the treatment and diagnosis of ovarian and other endometrial cancers, as well as reproductive dysfunction, pre-natal disorders or fetal deficiencies. Protein, as well as, antibodies directed against the protein may show utility as a tumor marker and/or immunotherapy targets for the above listed tissues.

[0060] Many polynucleotide sequences, such as EST sequences, are publicly available and accessible through sequence databases. Some of these sequences are related to SEQ ID NO:26 and may have been publicly available prior to conception of the present invention. Preferably, such related polynucleotides are specifically excluded from the scope of the present invention. To list every related sequence is cumbersome. Accordingly, preferably excluded from the present invention are one or more polynucleotides comprising a nucleotide sequence described by the general formula of a-b, where a is any integer between 1 to 2909 of SEQ ID NO:26, b is an integer of 15 to 2923, where both a and b correspond to the positions of nucleotide residues shown in SEQ ID NO:26, and where b is greater than or equal to a+14.

Features of Protein Encoded by Gene No: 17

[0061] The gene encoding the disclosed cDNA is thought to reside on chromosome 9. Accordingly, polynucleotides related to this invention are useful as a marker in linkage analysis for chromosome 9. This gene is expressed primarily in a variety of osteoclastic cells: osteoclastoma stromal cells, osteosarcoma, chondrosarcoma and stromal cell culture. To a lesser extent, it is also seen in a variety of fetal and embryonic cell and tissue types. Therefore, polynucleotides and polypeptides of the invention are useful as reagents for differential identification of the tissue(s) or cell type(s) present in a biological sample and for diagnosis of diseases and conditions which include, but are not limited to, bone cancer. Similarly, polypeptides and antibodies directed to these polypeptides are useful in providing immunological probes for differential identification of the tissue(s) or cell type(s). For a number of disorders of the above tissues or cells, particularly of the skeletal and developmental systems, expression of this gene at significantly higher or lower levels may be routinely detected in certain tissues or cell types (e.g., skeletal, developmental, cancerous and wounded tissues) or bodily fluids (e.g., lymph, serum, plasma, urine, synovial fluid and spinal fluid) or another tissue or cell sample taken from an individual having such a disorder, relative to the standard gene expression level, i.e., the expression level in healthy tissue or bodily fluid from an individual not having the disorder. Preferred epitopes include those comprising a sequence shown in SEQ ID NO. 132 as residues: Arg-43 to Asp-48, Asn-61 to Trp-67, Asp-94 to Gly-105, Ser-110 to Thr-119, Pro-138 to Ala-163, Thr-186 to Trp-196, His-236 to Arg-243, Arg-269 to Cys-279. The tissue distribution in osteoclastic cells indicates that the protein product of this gene is useful for the treatment and detection of a variety of disorders and conditions affecting bone, as well as the skeletal system, including: osteoporosis, fracture, osteosarcoma, osteoclastoma, chondrosarcoma, ossification and osteonecrosis, arthritis, tendonitis, chrondomalacia and inflammation. Furthermore, the tissue distribution indicates that the protein product of this gene is useful for the diagnosis and/or treatment of disorders of the developing embryo. Specific expression within the placenta indicates that this gene product may play a role in the proper establishment and maintenance of placental function. Alternately, this gene product may be produced by the placenta and then transported to the embryo, where it may play a crucial role in the development and/or survival of the developing embryo or fetus. Expression of this gene product in a vascular-rich tissue such as the placenta also indicates that this gene product may be produced more generally in endothelial cells or within the circulation. In such instances, it may play more generalized roles in vascular function, such as in angiogenesis. It may also be produced in the vasculature and have effects on other cells within the circulation, such as hematopoietic cells. It may serve to promote the proliferation, survival, activation, and/or differentiation of hematopoietic cells, as well as other cells throughout the body.

[0062] Many polynucleotide sequences, such as EST sequences, are publicly available and accessible through sequence databases. Some of these sequences are related to SEQ ID NO:27 and may have been publicly available prior to conception of the present invention. Preferably, such related polynucleotides are specifically excluded from the scope of the present invention. To list every related sequence is cumbersome. Accordingly, preferably excluded from the present invention are one or more polynucleotides comprising a nucleotide sequence described by the general formula of a-b, where a is any integer between 1 to 2940 of SEQ ID NO:27, b is an integer of 15 to 2954, where both a and b correspond to the positions of nucleotide residues shown in SEQ ID NO:27, and where b is greater than or equal to a+14.

Features of Protein Encoded by Gene No: 18

[0063] This gene is expressed primarily in smooth muscle. Therefore, polynucleotides and polypeptides of the invention are useful as reagents for differential identification of the tissue(s) or cell type(s) present in a biological sample and for diagnosis of diseases and conditions which include, but are not limited to, cardiovascular disorders including lymphatic system disorders. Similarly, polypeptides and antibodies directed to these polypeptides are useful in providing immunological probes for differential identification of the tissue(s) or cell type(s). For a number of disorders of the above tissues or cells, particularly of the cardiovascular and lymphatic systems, expression of this gene at significantly higher or lower levels may be routinely detected in certain tissues or cell types (e.g., cardiovascular, cancerous and wounded tissues) or bodily fluids (e.g., lymph, serum, plasma, urine, synovial fluid and spinal fluid) or another tissue or cell sample taken from an individual having such a disorder, relative to the standard gene expression level, i.e., the expression level in healthy tissue or bodily fluid from an individual not having the disorder. The tissue distribution in smooth muscle indicates that the protein product of this gene is useful for the diagnosis and treatment of conditions and pathologies of the cardiovascular system, such as heart disease, restenosis, atherosclerosis, stoke, angina, thrombosis, and wound healing. Protein, as well as, antibodies directed against the protein may show utility as a tumor marker and/or immunotherapy targets for the above listed tissues.

[0064] Many polynucleotide sequences, such as EST sequences, are publicly available and accessible through sequence databases. Some of these sequences are related to SEQ ID NO:28 and may have been publicly available prior to conception of the present invention. Preferably, such related polynucleotides are specifically excluded from the scope of the present invention. To list every related sequence is cumbersome. Accordingly, preferably excluded from the present invention are one or more polynucleotides comprising a nucleotide sequence described by the general formula of a-b, where a is any integer between 1 to 520 of SEQ ID NO:28, b is an integer of 15 to 534, where both a and b correspond to the positions of nucleotide residues shown in SEQ ID NO:28, and where b is greater than or equal to a+14.

Features of Protein Encoded by Gene No: 19

[0065] The translation product of this gene shares sequence homology with 5′-nucleotidase (See Genbank Accession No. 2668557), as well as the gene for alpha-1 collagen type X (See Genbank Accession No. gb|X67348|MMCOL10A).

[0066] In specific embodiments, polypeptides of the invention comprise the following amino acid sequence:

| | |
|---|---|
| MAQHFSLAACDVVGFDLDHTLCRYNLPESAPLIYNSFAQFLVKEKGYDKELLNVTPEDWDFCCKGLALDLEDGNFLKLANNGTVLR | (SEQ ID NO:255) |
| ASHGTKMMTPEVLAEAYGKKEWKHFLSDTGMACRSGKYYFYDNYFDLPGALLCARVVDYLTKLNNGQKTFDFWKDIVAAIQHNYKM | |
| SAFKENCGIYFPEIKRDPGRYLHSCPESVKKWLRQLKNAGKILLLITSSHSDYCRLLCEYILGNDFTDLFDIVITNALKPGFFSHL | |
| PSQRPFRTLENDEEQEALPSLDKPGWYSQGNAVHLYELLKKMTGKPEPKVVYFGDSMHSDIFPARHYSNWETVLILEELRGDEGTR | |
| SQRPEESEPLEKKGKYEGPKAKPLNTSSKKWGSFFIDSVLGLENTEDSLVYTWSCKRISTYSTIAIPSIEAIAELPLDYKFTRFSS | |
| SNSKTAGYYPNPPLVLSSDETLISK, | |
| TSSHSDYCRLLCEYILGNDFTDLFDIV, | (SEQ ID NO:256) |
| MAQHFSLAACDVVGFDLDHTLCRYNLPESAPLIYNSFAQFLVKEKGYDK, | (SEQ ID NO:257) |
| ELLNVTPEDWDFCCKGLALDLEDGNFLKLANNGTVLRASHGTKMMTPEVLAE, | (SEQ ID NO:258) |
| AYGKKEWKHFLSDTGMACRSGKYYFYDNYFDLPGALLCARVVDYLTKLN, | (SEQ ID NO:259) |
| NGQKTFDFWKDIVAAIQHNYKMSAFKENCGIYFPEIKRDPGRYLHSCPESVK, | (SEQ ID NO:260) |
| KWLRQLKNAGKILLLITSSHSDYCRLLCEYILGNDFTDLFDIVITNALKPGFFS, | (SEQ ID NO:261) |
| HLPSQRPFRTLENDEEQEALPSLDKPGWYSQGNAVHLYELLKKMTGKPEP, | (SEQ ID NO:262) |
| KVVYFGDSMHSDIFPARHYSNWETVLILEELRGDEGTRSQRPEESEPLEKKG, | (SEQ ID NO:263) |
| KYEGPKAKPLNTSSKKWGSFFIDSVLGLENTEDSLVYTWSCKRISTYSTIA, | (SEQ ID NO:264) |
| and/or | |
| IPSIEAIAELPLDYKFTRFSSSNSKTAGYYPNPPLVLSSDETLISK. | (SEQ ID NO:265) |

[0067] encompassed by the invention. Additionally, in specific embodiments, polypeptides of the invention comprise the following amino acid sequence::

| | |
|---|---|
| CCTTAAAAGCTGACATTTTATAATTGTGTTGTATAGCAGCAACTATATCCTTCCAAAAATCAAATGTTTTTTGACCATTGTTCAGT | (SEQ ID NO:252) |
| T, | |
| CCTTA AAAGCTGACATTTTATAATTGTGTTGTATAGCA, | (SEQ ID NO:253) |
| and/or | |
| CTTCCAAAAATCAAATGTTTTTTGACCATTGTTCAGTT. | (SEQ ID NO:254) |

encompassed by the invention.

[0068] The gene encoding the disclosed cDNA is thought to reside on chromosome 6. Accordingly, polynucleotides related to this invention are useful as a marker in linkage analysis for chromosome 6. This gene is expressed primarily in prostate and smooth muscle. Therefore, polynucleotides and polypeptides of the invention are useful as reagents for differential identification of the tissue(s) or cell type(s) present in a biological sample and for diagnosis of diseases and conditions which include, but are not limited to, prostate cancer and cardiovascular disorders. Similarly, polypeptides and antibodies directed to these polypeptides are useful in providing immunological probes for differential identification of the tissue(s) or cell type(s). For a number of disorders of the above tissues or cells, particularly of the prostate and cardiovascular system, expression of this gene at significantly higher or lower levels may be routinely detected in certain tissues or cell types (e.g., prostate, cardiovascular, cancerous and wounded tissues) or bodily fluids (e.g., lymph, serum, plasma, urine, synovial fluid and spinal fluid) or another tissue or cell sample taken from an individual having such a disorder, relative to the standard gene expression level, i.e., the expression level in healthy tissue or bodily fluid from an individual not having the disorder. The tissue distribution in prostate indicates that the protein product of this gene is useful for the treatment and diagnosis of prostate cancer and reproductive disorders. In addition, the expression in smooth muscle would suggest a role for this gene product in the treatment and diagnosis of cardiovascular disorders such as hypertension, restenosis, atherosclerosis, stoke, angina, thrombosis, and other aspects of heart disease and respiration. Protein, as well as, antibodies directed against the protein may show utility as a tissue-specific marker and/or immunotherapy target for the above listed tissues.

[0069] Many polynucleotide sequences, such as EST sequences, are publicly available and accessible through sequence databases. Some of these sequences are related to SEQ ID NO:29 and may have been publicly available prior to conception of the present invention. Preferably, such related polynucleotides are specifically excluded from the scope of the present invention. To list every related sequence is cumbersome. Accordingly, preferably excluded from the present invention are one or more polynucleotides comprising a nucleotide sequence described by the general formula of a-b, where a is any integer between 1 to 1813 of SEQ ID NO:29, b is an integer of 15 to 1827, where both a and b correspond to the positions of nucleotide residues shown in SEQ ID NO:29, and where b is greater than or equal to a+14.

Features of Protein Encoded by Gene No: 20

[0070] This gene is expressed primarily in endometrial tissue, and to a lesser extent in synovium. Therefore, polynucleotides and polypeptides of the invention are useful as reagents for differential identification of the tissue(s) or cell type(s) present in a biological sample and for diagnosis of diseases and conditions which include, but are not limited to, endometrial cancer and arthritis. Similarly, polypeptides and antibodies directed to these polypeptides are useful in providing immunological probes for differential identification of the tissue(s) or cell type(s). For a number of disorders of the above tissues or cells, particularly of the reproductive and skeletal systems, expression of this gene at significantly higher or lower levels may be routinely detected in certain tissues or cell types (e.g., reproductive, skeletal, cancerous and wounded tissues) or bodily fluids (e.g., lymph, serum, plasma, urine, synovial fluid and spinal fluid) or another tissue or cell sample taken from an individual having such a disorder, relative to the standard gene expression level, i.e., the expression level in healthy tissue or bodily fluid from an individual not having the disorder. Preferred epitopes include those comprising a sequence shown in SEQ ID NO. 135 as residues: Ser-19 to His-24, Pro-36 to Arg-43, Ala-61 to Gly-67, Pro-86 to Ala-95. The tissue distribution endometrial tissue indicates that the protein product of this gene is useful for the diagnosis and treatment of endometrial cancers, as well as reproductive and developmental disorders (fetal deficiencies and other pre-natal conditions). In addition, the expression of this gene product in synovium would suggest a role in the detection and treatment of disorders and conditions affecting the skeletal system, in particular the connective tissues (e.g. arthritis, trauma, tendonitis, chrondomalacia and inflammation), such as in the diagnosis or treatment of various autoimmune disorders such as rheumatoid arthritis, lupus, scleroderma, and dermatomyositis as well as dwarfism, spinal deformation, and specific joint abnormalities as well as chondrodysplasias (i.e. spondyloepiphyseal dysplasia congenita, familial osteoarthritis, Atelosteogenesis type II, metaphyseal chondrodysplasia type Schmid). Protein, as well as, antibodies directed against the protein may show utility as a tumor marker and/or immunotherapy targets for the above listed tissues.

[0071] Many polynucleotide sequences, such as EST sequences, are publicly available and accessible through sequence databases. Some of these sequences are related to SEQ ID NO:30 and may have been publicly available prior to conception of the present invention. Preferably, such related polynucleotides are specifically excluded from the scope of the present invention. To list every related sequence is cumbersome. Accordingly, preferably excluded from the present invention are one or more polynucleotides comprising a nucleotide sequence described by the general formula of a-b, where a is any integer between 1 to 1465 of SEQ ID NO:30, b is an integer of 15 to 1479, where both a and b correspond to the positions of nucleotide residues shown in SEQ ID NO:30, and where b is greater than or equal to a+14.

Features of Protein Encoded by Gene No: 21

[0072] The gene encoding the disclosed cDNA is thought to reside on chromosome 6. Accordingly, polynucleotides related to this invention are useful as a marker in linkage analysis for chromosome 6. This gene is expressed primarily in keratinocytes, fetal tissue (especially fetal brain) and leukocytic cell types and tissues (e.g., B-cell, macrophages, Jurkat T-Cell, T cell helper cells, spleen, thymus and lymphoma). Therefore, polynucleotides and polypeptides of the invention are useful as reagents for differential identification of the tissue(s) or cell type(s) present in a biological sample and for diagnosis of diseases and conditions which include, but are not limited to, integument and immune systems, as well as developmental disorders. Similarly, polypeptides and antibodies directed to these polypeptides are useful in providing immunological probes for differential identification of the tissue(s) or cell type(s). For a number of disorders of the above tissues or cells, particularly of the skin, immune and central nervous systems, expression of this gene at significantly higher or lower levels may be routinely detected in certain tissues or cell types (e.g., skin, immune, CNS, cancerous and wounded tissues) or bodily fluids (e.g., lymph, serum, plasma, urine, synovial fluid and spinal fluid) or another tissue or cell sample taken from an individual having such a disorder, relative to the standard gene expression level, i.e., the expression level in healthy tissue or bodily fluid from an individual not having the disorder. Preferred epitopes include those comprising a sequence shown in SEQ ID NO. 136 as residues: Gln-58 to Val-63. The tissue distribution in leukocytic cell types and tissues indicates that the protein product of this gene is useful for the diagnosis and treatment of immune disorders including leukemias, lymphomas, auto-immunities, immunodeficiencies (e.g. AIDS), immunosuppressive conditions (transplantation) and hematopoeitic disorders. Expression in keratinocytes would suggest a role for the gene product in the diagnosis and treatment of skin disorders such as cancers (melanomas), eczema, psoriasis, wound healing and grafts. In addition, the expression in fetal brain might implicate this gene product in the detection and treatment of developmental and neurodegenerative diseases of the brain and nervous system, or behavioral or nervous system disorders, such as depression, schizophrenia, Alzheimer's disease, Parkinson's disease, Huntington's disease, mania, dementia; paranoia, addictive behavior and sleep disorders. Protein, as well as, antibodies directed against the protein may show utility as a tumor marker and/or immunotherapy targets for the above listed tissues.

[0073] Many polynucleotide sequences, such as EST sequences, are publicly available and accessible through sequence databases. Some of these sequences are related to SEQ ID NO:31 and may have been publicly available prior to conception of the present invention. Preferably, such related polynucleotides are specifically excluded from the scope of the present invention. To list every related sequence is cumbersome. Accordingly, preferably excluded from the present invention are one or more polynucleotides comprising a nucleotide sequence described by the general formula of a-b, where a is any integer between 1 to 973 of SEQ ID NO:31, b is an integer of 15 to 987, where both a and b correspond to the positions of nucleotide residues shown in SEQ ID NO:31, and where b is greater than or equal to a+14.

Features of Protein Encoded by Gene No: 22

[0074] Translation product of this gene shares significant homology with the conserved YME1 PROTEIN from Saccharomyces cerevisiae, which is a putative ATP-dependent protease thought to regulate the assembly of key respiratory chains within the mitochondria (See Genbank Accession No. P32795). Furthermore, the translation product of this gene also shares significant homology with a metalloproteinase from mouse (See Genbank Accession No. AF090430).

[0075] In specific embodiments, polypeptides of the invention comprise the following amino acid sequence:

| | |
|---|---|
| MKTKNIPEAHQDAFKTGFAEGFLKAQALTQKTNDSLRRTRLILFVLLLFGIYGLLKNPFLSVRFRTTTGLDSAVDPVQMKNVTFEH | (SEQ ID NO:266) |
| VKGVEEAKQELQEVVEFLKNPQKFTILGGKLPKGILLVGPPGTGKTLLARAVAGEADVPFYYASGSEFDEMFVGVGASRIRNLFRE | |
| AKANAPCVIFIDELDSVGGKRIESPMHPYSRQTINQLLAEMDGFKPNEGVIIIGATNFPEALDNALIRPGRFDMQVTVPRPDVKGR | |
| TEILKWYLNKIKFDXSVDPEIIARGTVGFSGAELENLVNQAALKAAVDGKEMVTMKELGVFQRQNSNGA, | |
| MKTKNIPEAHQDAFKTGFAEG, | (SEQ ID NO:267) |
| PVQMKNVTFEHVKGVEEAKQELQ, | (SEQ ID NO:268) |
| SRQTINQLLAEMDGFKPNEGVII, | (SEQ ID NO:269) |
| and/or | |
| FSGAELENLVNQAALKAAVDG KEM. | (SEQ ID NO:270) |

invention.

[0076] The gene encoding the disclosed cDNA is thought to reside on chromosome 10. Accordingly, polynucleotides related to this invention are useful as a marker in linkage analysis for chromosome 10. This gene is expressed primarily in T-cells. Therefore, polynucleotides and polypeptides of the invention are useful as reagents for differential identification of the tissue(s) or cell type(s) present in a biological sample and for diagnosis of diseases and conditions which include, but are not limited to, immune and hematopoeitic disorders. Similarly, polypeptides and antibodies directed to these polypeptides are useful in providing immunological probes for differential identification of the tissue(s) or cell type(s). For a number of disorders of the above tissues or cells, particularly of the immune and hematopoeitic systems, expression of this gene at significantly higher or lower levels may be routinely detected in certain tissues or cell types (e.g., immune, cancerous and wounded tissues) or bodily fluids (e.g., lymph, serum, plasma, urine, synovial fluid and spinal fluid) or another tissue or cell sample taken from an individual having such a disorder, relative to the standard gene expression level, i.e., the expression level in healthy tissue or bodily fluid from an individual not having the disorder. The tissue distribution in T-cells indicates that the protein product of this gene is useful for the diagnosis and treatment of immune disorders, including leukemias, lymphomas, auto-immunities, immunodeficiencies (e.g. AIDS), immunosuppressive conditions (transplantation) and hematopoeitic disorders. Additionally, this gene product may be involved in the regulation of cytokine production, antigen presentation, or other processes that may also suggest a usefulness in the treatment of cancer (e.g. by boosting immune responses). Expression of this gene product in T cells also strongly indicates a role for this protein in immune function and immune surveillance. Since the gene is expressed in cells of lymphoid origin, the gene or protein, as well as, antibodies directed against the protein may show utility as a tumor marker and/or immunotherapy targets for the above listed tissues. Furthermore, the homology of this gene indicates that it may play an important role in disorders affecting metabolism.

[0077] Many polynucleotide sequences, such as EST sequences, are publicly available and accessible through sequence databases. Some of these sequences are related to SEQ ID NO:32 and may have been publicly available prior to conception of the present invention. Preferably, such related polynucleotides are specifically excluded from the scope of the present invention. To list every related sequence is cumbersome. Accordingly, preferably excluded from the present invention are one or more polynucleotides comprising a nucleotide sequence described by the general formula of a-b, where a is any integer between 1 to 2919 of SEQ ID NO:32, b is an integer of 15 to 2933, where both a and b correspond to the positions of nucleotide residues shown in SEQ ID NO:32, and where b is greater than or equal to a+14.

Features of Protein Encoded by Gene No: 23

[0078] This gene is expressed primarily in human chronic synovitis. Therefore, polynucleotides and polypeptides of the invention are useful as reagents for differential identification of the tissue(s) or cell type(s) present in a biological sample and for diagnosis of diseases and conditions which include, but are not limited to, synovial and other inflammatory disorders. Similarly, polypeptides and antibodies directed to these polypeptides are useful in providing immunological probes for differential identification of the tissue(s) or cell type(s). For a number of disorders of the above tissues or cells, particularly of the synovial tissue and immune system, expression of this gene at significantly higher or lower levels may be routinely detected in certain tissues or cell types (e.g., synovial, cancerous and wounded tissues) or bodily fluids (e.g., lymph, serum, plasma, urine, synovial fluid and spinal fluid) or another tissue or cell sample taken from an individual having such a disorder, relative to the standard gene expression level, i.e., the expression level in healthy tissue or bodily fluid from an individual not having the disorder. The tissue distribution in human chronic synovitis indicates that the protein product of this gene is useful for the study, diagnosis and treatment of inflammatory disorders such as chronic synovitis. In addition, the expression of this gene product in synovium indicates a role in the detection and treatment of disorders and conditions affecting the skeletal system, in particular osteoporosis as well as disorders afflicting connective tissues (e.g. arthritis, trauma, tendonitis, chrondomalacia and inflammation), such as in the diagnosis or treatment of various autoimmune disorders such as rheumatoid arthritis, lupus, scleroderma, and dermatomyositis as well as dwarfism, spinal deformation, and specific joint abnormalities as well as chondrodysplasias (i.e. spondyloepiphyseal dysplasia congenita, familial osteoarthritis, Atelosteogenesis type II, metaphyseal chondrodysplasia type Schmid). Protein, as well as, antibodies directed against the protein may show utility as a tumor marker and/or immunotherapy targets for the above listed tissues.

[0079] Many polynucleotide sequences, such as EST sequences, are publicly available and accessible through sequence databases. Some of these sequences are related to SEQ ID NO:33 and may have been publicly available prior to conception of the present invention. Preferably, such related polynucleotides are specifically excluded from the scope of the present invention. To list every related sequence is cumbersome. Accordingly, preferably excluded from the present invention are one or more polynucleotides comprising a nucleotide sequence described by the general formula of a-b, where a is any integer between 1 to 1352 of SEQ ID NO:33, b is an integer of 15 to 1366, where both a and b correspond to the positions of nucleotide residues shown in SEQ ID NO:33, and where b is greater than or equal to a+14.

Features of Protein Encoded by Gene No: 24

[0080] This gene is expressed primarily in pituitary, breast cancer, and bone marrow, and to a lesser extent in breast, prostate, uterine cancer and cerebellum. Therefore, polynucleotides and polypeptides of the invention are useful as reagents for differential identification of the tissue(s) or cell type(s) present in a biological sample and for diagnosis of diseases and conditions which include, but are not limited to, endocrine, reproductive disorders and cancers. Similarly, polypeptides and antibodies directed to these polypeptides are useful in providing immunological probes for differential identification of the tissue(s) or cell type(s). For a number of disorders of the above tissues or cells, particularly of the reproductive, metabolic and endocrine systems, expression of this gene at significantly higher or lower levels may be routinely detected in certain tissues or cell types (e.g., endocrine, reproductive, cancerous and wounded tissues) or bodily fluids (e.g., lymph, serum, plasma, urine, synovial fluid and spinal fluid) or another tissue or cell sample taken from an individual having such a disorder, relative to the standard gene expression level, i.e., the expression level in healthy tissue or bodily fluid from an individual not having the disorder. Preferred epitopes include those comprising a sequence shown in SEQ ID NO. 139 as residues: Asp-32 to Gln-38, Lys-88 to Ile-97. The tissue distribution pituitary indicates that the protein products of this gene are useful for the study, treatment and diagnosis of various endocrine disorders, particularly Addison's disease, Cushing's Syndrome, and disorders and/or cancers of the pancreas (e.g. diabetes mellitus), adrenal cortex, ovaries, pituitary (e.g., hyper-, hypopituitarism), thyroid (e.g. hyper-, hypothyroidism), parathyroid (e.g. hyper-, hypoparathyroidism), hypothalamus, and testes, as well as reproductive diseases and disorders. Alternatively, the tissue distribution to breast cancer tissue indicates that the protein product of this gene is useful for the diagnosis and intervention of these tumors, as well as other tumors where expression is indicated. Protein, as well as, antibodies directed against the protein may show utility as a tissue-specific marker and/or immunotherapy target for the above listed tissues.

[0081] Many polynucleotide sequences, such as EST sequences, are publicly available and accessible through sequence databases. Some of these sequences are related to SEQ ID NO:34 and may have been publicly available prior to conception of the present invention. Preferably, such related polynucleotides are specifically excluded from the scope of the present invention. To list every related sequence is cumbersome. Accordingly, preferably excluded from the present invention are one or more polynucleotides comprising a nucleotide sequence described by the general formula of a-b, where a is any integer between 1 to 653 of SEQ ID NO:34, b is an integer of 15 to 667, where both a and b correspond to the positions of nucleotide residues shown in SEQ ID NO:34, and where b is greater than or equal to a+14.

Features of Protein Encoded by Gene No: 25

[0082] The translation product of this gene shares sequence homology with androgen withdrawal apoptosis protein in rat which is thought to be important in programmed cell death. In specific embodiments, polypeptides of the invention comprise the following amino acid sequence:

| | |
|---|---|
| LPMWQVTAFLDHNIVTAQTTWKGLWMSCVVQSTGHMQCKVYDSVLALSTEVQAARALTVSAVLLAFVALFVTLAGAQCTTCVAPGP | (SEQ ID NO:271) |
| AKARVALTGGVLYLFCGLLALVPLCWFANIVVREFYDPSVPVSQKYELGAXLYIGWAATALLMVGGCLLCCGAWVCTGRPDLSFPV | |
| KYSAPRRPTATGDYDKKNYV, | |
| EVRQTRGANGLGPRAGSAGAKAPGPAQGAAQHGLGGSAGLRVRVSPLA, | (SEQ ID NO:272) |
| RGANGLGPRAGSAGAKAPGPAQG, | (SEQ ID NO:273) |
| RLRAARGSVIGCGTMTRARIGCFGPGGRARGTESAPEPSKRVPPGRXWQTLGGATDPRGKRTGAKSRERGRKGTRARPGRRAAR | (SEQ ID NO:274) |
| PWGFCGPSGARLASSHGVRSVGDPGPGAVPGGLGGSDPGVRAAHVAGDRLPGPQHRDGADHLEGAVDVVRGAEHXAHAVQSVRLGA | |
| GSEHRGAGGAGAHRERRAAGVRCALRDPGGRAVHHLRGPGPGQGACGPHGRRALPVLRAAGARATLLVRQHCRPRVLRPVCARVAE | |
| VRAGRXLYIGWAATALLMVGGCLLCCGAWVCTGRPDLSFPVKYSAPRRPTATGDYDKKNYV, | |
| GCFGPGGRARGTESAPEPSKRVPPGRX, | (SEQ ID NO:275) |
| GGATDPRGKRTGAKSRERGRKGTRARP, | (SEQ ID NO:276) |
| GPSGARLASSHGVRSVGDPGPGAVP, | (SEQ ID NO:277) |
| AAHVAGDRLPGPQHRDGADHLEGAVD, | (SEQ ID NO:278) |
| AVQSVRLGAGSEHRGAGGAGAHR, | (SEQ ID NO:279) |
| CALRDPGGRAVHHLRGPGPGQGACGPH, | (SEQ ID NO:280) |
| RATLLVRQHCRPRVLRPVCARVAEVRA, | (SEQ ID NO:281) |
| LYIGWAATALLMVGGCLLCCGAWVCTG, | (SEQ ID NO:282) |
| MGSAALE, | (SEQ ID NO:283) |
| ACGLPMWQVTAFLDHNIVTAQTTWKGLWMSCVVQSTG, | (SEQ ID NO:284) |
| HMQCKVYDSVLALSTEVQAAR, | (SEQ ID NO:285) |
| GAQCTTCVAPGPAKARVALT, | (SEQ ID NO:286) |
| GGVLYLFCGLLALVPLCWFANIVVREFYDPSVPVSQKYELGA, | (SEQ ID NO:287) |
| and/or | |
| LYIGWAATA. | (SEQ ID NO:288) |

polypeptide is expected to contain multiple transmembrane domains. The extracellular portion of the polypeptide is expected to comprise residues 1-51 of the foregoing amino acid sequence. Therefore, particularly preferred polypeptides encoded by this gene comprise residues 1-51 of the foregoing amino acid sequence. Polynucleotides encoding these polypeptides are also encompassed by the invention. This gene is expressed primarily in human adult pulmonary and brain (striatum) tissue, and to a lesser extent, in thymus, synovium and testis. Therefore, polynucleotides and polypeptides of the invention are useful as reagents for differential identification of the tissue(s) or cell type(s) present in a biological sample and for diagnosis of diseases and conditions which include, but are not limited to, reproductive, metabolic, pulmonary, or neurodegenerative disorders. Similarly, polypeptides and antibodies directed to these polypeptides are useful in providing immunological probes for differential identification of the tissue(s) or cell type(s). For a number of disorders of the above tissues or cells, particularly of the reproductive, nervous, respiratory and metabolic systems expression of this gene at significantly higher or lower levels may be routinely detected in certain tissues or cell types (e.g., pulmonary, neural, endocrine, skeletal, reproductive, and cancerous and wounded tissues) or bodily fluids (e.g., lymph, serum, plasma, seminal fluid, pulmonary surfactant or sputum, urine, synovial fluid and spinal fluid) or another tissue or cell sample taken from an individual having such a disorder, relative to the standard gene expression level, i.e., the expression level in healthy tissue or bodily fluid from an individual not having the disorder. The tissue distribution in testes, combined with the homology to the androgen withdrawal apoptosis rat protein indicates that polynucleotides and polypeptides corresponding to this gene are useful for the study, diagnosis and treatment of disorders in which the mechanisms controlling programmed cell death are instrumental. This could include reproductive, neurodegenerative, and various metabolic disorders and diseases such as cancer. Moreover, the protein product of this gene is useful for the detection/treatment of neurodegenerative disease states, behavioral disorders, or inflammatory conditions which include, but are not limited to Alzheimer's Disease, Parkinson's Disease, Huntington's Disease, Tourette Syndrome, meningitis, encephalitis, demyelinating diseases, peripheral neuropathies, neoplasia, trauma, congenital malformations, spinal cord injuries, ischemia and infarction, aneurysms, hemorrhages, schizophrenia, mania, dementia, paranoia, obsessive compulsive disorder, depression, panic disorder, learning disabilities, ALS, psychoses, autism, and altered behaviors, including disorders in feeding, sleep patterns, balance, and perception. In addition, elevated expression of this gene product in regions of the brain indicates that it plays a role in normal neural function. Potentially, this gene product is involved in synapse formation, neurotransmission, learning, cognition, homeostasis, or neuronal differentiation or survival. Protein, as well as, antibodies directed against the protein may show utility as a tumor marker and/or immunotherapy targets for the above listed tissues.

[0083] Many polynucleotide sequences, such as EST sequences, are publicly available and accessible through sequence databases. Some of these sequences are related to SEQ ID NO:35 and may have been publicly available prior to conception of the present invention. Preferably, such related polynucleotides are specifically excluded from the scope of the present invention. To list every related sequence is cumbersome. Accordingly, preferably excluded from the present invention are one or more polynucleotides comprising a nucleotide sequence described by the general formula of a-b, where a is any integer between 1 to 1696 of SEQ ID NO:35, b is an integer of 15 to 1710, where both a and b correspond to the positions of nucleotide residues shown in SEQ ID NO:35, and where b is greater than or equal to a+14.

Features of Protein Encoded by Gene No: 26

[0084] The translation product of this gene shares homology with both ubiquitin and a G-protein coupled receptor TM3 consensus polypeptide (see Genbank accession Nos. gnl|PID|e331456 (AJ000657) and R50664, respectively).

[0085] In specific embodiments, polypeptides of the invention comprise the following amino acid sequence:

| | |
|---|---|
| LHYFALSFVLILTEICLVSSGMGF, | (SEQ ID NO:289) |
| QLRNGIPPGRKALFCSGKPRLFTLGQGRTCA, | (SEQ ID NO:290) |
| WSGLWVTTWNGSSGERTPSPWRRKRASQSAGRIASWMSF, | (SEQ ID NO:291) |
| WRTQGP, | (SEQ ID NO:292) |
| PVGRVTGQGPAGRWVRRLPCSRRAGGERGPHWGVWAGPQMSCGLXFGPWFVPMLLMSHSLLPSWSGLWVTTWNGSSGERTPSPWRR | (SEQ ID NO:293) |
| KRASQSAGRIASWMSF, | |
| WVRRLPCSRRAGGERGPHWGVWAGPQMSC, | (SEQ ID NO:294) |
| WSGLWVTTWNGSSGERTPSPWRRKRA, | (SEQ ID NO:295) |
| TLAVNLCGQAVWPLVGMAGIWALPLGGIPACLVPVCTGKNSNMHLAPFTILPYPLCSFLLKSVLSAQEWDSPRKESTFLFWEAQTV | (SEQ ID NO:296) |
| HFGAGTNMCLVNLLENSHHLLPPSLYSEKPD, | |
| LVGMAGIWALPLGGIPACLVPVC, | (SEQ ID NO:297) |
| FLLKSVLSAQEWDSPRKESTFL, | (SEQ ID NO:298) |
| and/or | |
| AGTNMCLVNLLENSHHLLPPSLYSEK. | (SEQ ID NO:299) |

invention.

[0086] The gene encoding the disclosed cDNA is believed to reside on chromosome 1. Accordingly, polynucleotides related to this invention are useful as a marker in linkage analysis for chromosome 1. This gene is expressed primarily in activated T cells, and to a lesser extent, in CD34 depleted buffy coat. Therefore, polynucleotides and polypeptides of the invention are useful as reagents for differential identification of the tissue(s) or cell type(s) present in a biological sample and for diagnosis of diseases and conditions which include, but are not limited to, immune and hemopoietic disorders. Similarly, polypeptides and antibodies directed to these polypeptides are useful in providing immunological probes for differential identification of the tissue(s) or cell type(s). For a number of disorders of the above tissues or cells, particularly of the hemopoietic and immune system, expression of this gene at significantly higher or lower levels may be routinely detected in certain tissues or cell types (e.g., immune, hemopoietic, and cancerous and wounded tissues) or bodily fluids (e.g., lymph, serum, plasma, urine, synovial fluid and spinal fluid) or another tissue or cell sample taken from an individual having such a disorder, relative to the standard gene expression level, i.e., the expression level in healthy tissue or bodily fluid from an individual not having the disorder. Preferred epitopes include those comprising a sequence shown in SEQ ID NO. 141 as residues: Thr-15 to His-21, Gly-30 to Lys-39, Arg-113 to Met-118, Arg-178 to Ala-187. The tissue distribution in activated T-cells indicates that polynucleotides and polypeptides corresponding to this gene are useful for the treatment and diagnosis of hematopoetic related disorders such as anemia, pancytopenia, leukopenia, thrombocytopenia or leukemia since stromal cells are important in the production of cells of hematopoietic lineages; The uses include bone marrow cell ex vivo culture, bone marrow transplantation, bone marrow reconstitution, radiotherapy or chemotherapy of neoplasia. The gene product may also be involved in lymphopoiesis, therefore, it can be used in immune disorders such as infection, inflammation, allergy, immunodeficiency etc. Furthermore, the homology to G-coupled proteins as well as to ubiquitin may implicate this gene as being important in regulation of gene expression and protein sorting—both of which are vital to development and would healing models. Therefore, the gene may provide utility in the diagnosis, prevention, and/or treatment of various developmental disorders which include, but are not limited to Tay-Sachs disease, phenylkenonuria, galactosemia, hyperlipidemias, porphyrias, and Hurler's syndrome. The tissue distribution within CD34 depleted buffy coat cells further implicates the invention as having a utility in the treatment, detection, and/or prevention of developmental disorders. Protein, as well as, antibodies directed against the protein may show utility as a tumor marker and/or immunotherapy targets for the above listed tissues.

[0087] Many polynucleotide sequences, such as EST sequences, are publicly available and accessible through sequence databases. Some of these sequences are related to SEQ ID NO:36 and may have been publicly available prior to conception of the present invention. Preferably, such related polynucleotides are specifically excluded from the scope of the present invention. To list every related sequence is cumbersome. Accordingly, preferably excluded from the present invention are one or more polynucleotides comprising a nucleotide sequence described by the general formula of a-b, where a is any integer between 1 to 1082 of SEQ ID NO:36, b is an integer of 15 to 1096, where both a and b correspond to the positions of nucleotide residues shown in SEQ ID NO:36, and where b is greater than or equal to a+14.

Features of Protein Encoded by Gene No: 27

[0088] The translation product of this gene was found to have homology to the F38H4.7 protein of Caenorhabditis elegans, in addition to the muscle-specific human sarcosin protein (See Genbank Accession Nos. gnl|PID|e255903 and gi|3047308 (AF056929), respectively) which are thought to play a role in regulating certain aspects of cellular metabolism.

[0089] In specific embodiments, polypeptides of the invention comprise the following amino acid sequence: VGKGLSSQR (SEQ ID NO:300),

| | |
|---|---|
| KNHLGAWSEEDTPPMALGRTQVPGVTGQKHAGWVGAWPEWGGAVPQHLGVAPTAPGGLGQQYVQASSAPGPGRGRLGPHSAAGELW | (SEQ ID NO:301) |
| GTGSESHLGLQGPRGPSREAGQRGPLSGPIRWMRTDTANRSPPGPGLGLSGRGRPHTESCVRRTQAGIQAVGTPRRLGLGGLGHVT | |
| GGARVLINGQEQKERKVWDPRLWEQRHPGWLLAEKWESQMHCNVQ, | |
| TPPMALGRTQVPGVTGQKHAGWV, | (SEQ ID NO:302) |
| YVQASSAPGPGRGRLGPHSAAG, | (SEQ ID NO:303) |
| HLGLQGPRGPSREAGQRGPLSGPIRW, | (SEQ ID NO:304) |
| LGLSGRGRPHTESCVRRTQAG, | (SEQ ID NO:305) |
| PRRLGLGGLGHVTGGARVLINGQEQ, | (SEQ ID NO:306) |
| GAAVQCRCPLVRGRVSAAAAAGDAREQAEGSGQGPGPHSLPAHDHRGVRCRSRTVGHPGGPRGGQPLLHFTVNPKPRVEFIDRPRC | (SEQ ID NO:307) |
| CLRGKECSINRFQQVESRWGYXGTSDRIRFSVNKRIFVVGFGLYGSIHGPTDYQVNIQIIHTDSNTVLGQNDTGFSCDGSASTFRV | |
| MFKEPVEVLPNVNYTACATLKGPDSHYGTKGLRKVTHESPTTGAKTCFTFCYAAGNNNGTSVEDGQIPEVIFYT, | |
| EQAEGSGQGPGPHSLPAHDHRGVR, | (SEQ ID NO:308) |
| GPRGGQPLLHFTVNPKPRVEFID, | (SEQ ID NO:309) |
| ECSINRFQQVESRWGYXGTSDRIRFSV, | (SEQ ID NO:310) |
| YGSIHGPTDYQVNIQIIHTDSNTVL, | (SEQ ID NO:311) |
| SCDGSASTFRVMFKEPVEVLPNVN, | (SEQ ID NO:312) |
| VTHESPTTGAKTCFTFCYAAGNNNGT, | (SEQ ID NO:313) |
| HSASDQRTTALNSRTSRMPSVSRSRTATSVSRSMSVKPSAVMASAVFLSMFSRHRLASCGSSKSRACVSSMKALSARRFFFRNSTQ | (SEQ ID NO:314) |
| WASSAGTAYFLAVYXVVITVSGPICTS SE, | |
| TTALNSRTSRMPSVSRSRTATSVSRS, | (SEQ ID NO:315) |
| and/or | |
| SRHRLASCGSSKSRACVSSMKALSA. | (SEQ ID NO:316) |

invention.

[0090] This gene is expressed primarily in activated T cells, and to a lesser extent, in fetal kidney. Therefore, polynucleotides and polypeptides of the invention are useful as reagents for differential identification of the tissue(s) or cell type(s) present in a biological sample and for diagnosis of diseases and conditions which include, but are not limited to, immune, developmental, renal, and metabolic diseases. Similarly, polypeptides and antibodies directed to these polypeptides are useful in providing immunological probes for differential identification of the tissue(s) or cell type(s). For a number of disorders of the above tissues or cells, particularly of the immune and metabolic systems, expression of this gene at significantly higher or lower levels may be routinely detected in certain tissues or cell types (e.g., immune, developmental, renal, metabolic, and cancerous and wounded tissues) or bodily fluids (e.g., lymph, serum, amniotic fluid, plasma, urine, synovial fluid and spinal fluid) or another tissue or cell sample taken from an individual having such a disorder, relative to the standard gene expression level, i.e., the expression level in healthy tissue or bodily fluid from an individual not having the disorder. The tissue distribution in activated T-cells and fetal kidney indicates that polynucleotides and polypeptides corresponding to this gene are useful for the study and treatment of diseases and disorders of the immune, metabolic, and endocrine systems; such as renal diseases and T cell dysfunctions. Since the gene is expressed in cells of lymphoid origin, the natural gene product may be involved in immune functions. Therefore it may be also used as an agent for immunological disorders including arthritis, asthma, immune deficiency diseases such as AIDS, and leukemia. Moreover, this gene or gene product could be used in the treatment and/or detection of kidney diseases including renal failure, nephritus, renal tubular acidosis, proteinuria, pyuria, edema, pyelonephritis, hydronephritis, nephrotic syndrome, crush syndrome, glomerulonephritis, hematuria, renal colic and kidney stones, in addition to Wilm's Tumor Disease, and congenital kidney abnormalities such as horseshoe kidney, polycystic kidney, and Falconi's syndrome. Protein, as well as, antibodies directed against the protein may show utility as a tumor marker and/or immunotherapy targets for the above listed tissues.

[0091] Many polynucleotide sequences, such as EST sequences, are publicly available and accessible through sequence databases. Some of these sequences are related to SEQ ID NO:37 and may have been publicly available prior to conception of the present invention. Preferably, such related polynucleotides are specifically excluded from the scope of the present invention. To list every related sequence is cumbersome. Accordingly, preferably excluded from the present invention are one or more polynucleotides comprising a nucleotide sequence described by the general formula of a-b, where a is any integer between 1 to 2265 of SEQ ID NO:37, b is an integer of 15 to 2279, where both a and b correspond to the positions of nucleotide residues shown in SEQ ID NO:37, and where b is greater than or equal to a+14.

Features of Protein Encoded by Gene No: 28

[0092] The translation product of this gene shares sequence homology with Cystatin-related epididymal specific protein in mouse, which is thought to be important in reproductive system function/regulation (See Genbank accession no.bbs|118813). Based on the structural similarity between these proteins, the translation product of this gene, hereinafter “Cystatin G”, is expected to share biological activities with cystatin related proteins and other cysteine protease inhibitors. Such activities are known in the art and are described elsewhere herein.

[0093] In specific embodiments, polypeptides of the invention comprise the following amino acid sequence:

(SEQ ID NO:319)

MPRCRWLSLILLTIPLALVARKDPKKNETGVLRKLKPVNASNANVKQCLW
FAMQEYNKESEDKYVFLVVKTLQAQLQVTNLLEYLIDVEIARSDCRKPLS
TNEICAIQENSKLKRKLSCSFLVGALPWNGEFTVMEKKCEDA,

(SEQ ID NO:321)

ARKDPKKNETGVLRKLKPVNASNANVKQCLWFAMQEYNKESEDKYVFLVV
KTLQAQLQVTNLLEYLIDVEIARSDCRKPLSTNEICAIQENSKLKRKLSCSFLVGA
LPWNGEFTVMEKKCEDA,

(SEQ ID NO:320)

CLWFAMQEYNKESEDKYVFLVVKTLQAQLQVTNLLEYLIDVEIARSDCRK
PLSTNEICAIQENSKLKRKLSCSFLVGALPWNGEFTVMEKKC

(SEQ ID NO:317)

EYNKESEDKYVFLV,

(SEQ ID NO:322)

THSSSCCGHPILPTAPALRRRGGESTLPLAQGT

(SEQ ID NO:)

IDVEIARSDCRKPL,

(SEQ ID NO:323)

SWACSVLTTRKTYLSSLSLLYSCMAKPXTLLPRWXLKALTGFNF
LSTPVSFFFGSFLATRARGMVRRIRESHRHLGMVPWARGKVDSPPRRLRA
GAVGRMGWPQLLLWVQESSSHTLPPVSVSPAL,
and/or

(SEQ ID NO:324)

SWACSVLTTRKTYLSSLSLLYSCMAKPXTLLPRWXLKALTGFNFLSTPVS
FFFGSFLATRARGMVRRIRESHRHLGMVPWARGKVDSPPRRLRAGAVGRM
GWPQLLLWVQESSSHTLPPVSVSPAL.

encompassed by the invention.

[0094] Preferred cystatin polypeptide fragments are shown to be active in the following assays: The methods used for active site titration of papain, titration of the molar enzyme inhibitory concentration in cystatin G preparations, and for determination of equilibrium constants for dissociation (Ki) of complexes between cystatin G and cysteine peptidases are described in detail in Hall et al., Biochem. J., 291: 123-29 (1993) and Abrahamson, Methods Enzymol., 244: 685-700 (1994), both of which are hereby incorporated herein by reference. The enzymes used for equilibrium assays are papain (EC 3.4.22.2; from Sigma, St Lois, Mo.) and cathepsin B (EC 3.4.22.1; from Calbiochem, La Jolla, Calif.). The fluorogenic substrate used was Z-Phe-Arg-NHMec (10 mM; from Bachem Feinchemikalien, Bubendorf, Switzerland) and the assay buffer was 100 mM Na-phosphate buffer (pH 6.5 and 6.0 for papain and cathepsin B, respectively), containing 1 mM dithiothreitol and 2 mM EDTA. Steady state velocities are measured and Ki values were calculated according to Henderson, Biochem J., 127: 321-333 (1972), incorporated herein by reference. Corrections for substrate competition are made using Km values of 150=B5M for cathepsins B (Barrett and Kirschke, Methods Enzymol., 80: 535-561 (1981) and 60=B5M for papain (Hall et al., Biochem. J., 291: 123-29 (1992)), both of which are hereby incorporated herein by reference. This gene is expressed primarily in human testes. Therefore, polynucleotides and polypeptides of the invention are useful as reagents for differential identification of the tissue(s) or cell type(s) present in a biological sample and for diagnosis of diseases and conditions which include, but are not limited to, reproductive disorders and cancer. Similarly, polypeptides and antibodies directed to these polypeptides are useful in providing immunological probes for differential identification of the tissue(s) or cell type(s). For a number of disorders of the above tissues or cells, particularly of the reproductive system, expression of this gene at significantly higher or lower levels may be routinely detected in certain tissues or cell types (e.g., reproductive, testicular, and cancerous and wounded tissues) or bodily fluids (e.g., lymph, serum, plasma, seminal fluid, urine, synovial fluid and spinal fluid) or another tissue or cell sample taken from an individual having such a disorder, relative to the standard gene expression level, i.e., the expression level in healthy tissue or bodily fluid from an individual not having the disorder. Preferred epitopes include those comprising a sequence shown in SEQ ID NO. 143 as residues: Arg-21 to Thr-29. The tissue distribution in testes, combined with the homology to the mouse cystatin-related epididymal specific protein indicates that polynucleotides and polypeptides corresponding to this gene are useful for the study, diagnosis, treatment, and/or prevention of reproductive diseases and disorders. The protein may also show utility in the development and use as a contraceptive. Cysteine proteinase inhibitors of the cystatin superfamily are ubiquitous in the body and are generally tight-binding inhibitors of papain-like cysteine proteinases, such as cathepsins B, H, L, S, and K (for review, see Ref. 1). They should therefore serve a protective function to regulate the activities of such endogenous proteinases, which otherwise may cause uncontrolled proteolysis and tissue damage. Cysteine proteinase activity can normally not be measured in body fluids, but can been detected extracellularly in conditions like endotoxin-induced sepsis (2), metastasizing cancer (3), and at local inflammatory processes in rheumatoid arthritis (4), purulent bronchiectasis (5) and periodontitis (6), which indicates that a tight cystatin regulation is a necessity in the normal state. A deficiency state in which the levels of the intracellular cystatin, cystatin B, are lowered due to mutations has recently been shown to segregate with a form of progressive myoclonus epilepsy (7), which points to additional specialized functions of cystatins. Moreover, results showing that chicken cystatin inhibits polio virus replication (8), human cystatin C inhibits corona and herpes simplex virus replication (9,10), and human cystatin a inhibits rhabdovirus-induced apoptosis (11) in cell cultures indicates that cystatins play additional roles in the human defense system. The cystatins constitute a superfamily of evolutionary related proteins, all composed of at least one 100-120 residue domain with conserved sequence motifs (12). The previously well characterized single-domain human members of superfamily could be grouped in two protein families. The Family 1 members, cystatins (or stefins) a and B, contain approximately 100 amino acid residues, lack disulfide bridges, and are not synthesized as preproteins with signal peptides. The Family 2 cystatins (cystatins C, D, S, SN, and SA) are secreted proteins of approx. 120 amino acid residues (Mr 13,000-14,000) and have two characteristic intrachain disulfide bonds. Recently, we identified an additional human cystatin superfamily member by EST1 sequencing in epithelial cell derived cDNA libraries which we named cystatin E (13). The same cystatin was independently discovered by differential display experiments as a mRNA species down-regulated in breast tumor tissue, but present in the surrounding epithelium and reported under the name cystatin M (14). Cystatin E/M is an atypical, secreted low-Mr cystatin in that it is a glycoprotein and just shows 30-35% sequence identity in alignments with the human Family 2 cystatins, which shows that additional cystatin families are yet to be identified (13). The cystatin E/M gene has been localized to chromosome 2 (15), whereas all human Family 2 cystatin genes are clustered on the short arm of chromosome 20 (16), which further stresses that cystatin E/M is just distantly related to the other secreted human low-Mr cystatins. Protein, as well as, antibodies directed against the protein may show utility as a tumor marker and/or immunotherapy targets for the above listed tissues.

[0095] Many polynucleotide sequences, such as EST sequences, are publicly available and accessible through sequence databases. Some of these sequences are related to SEQ ID NO:38 and may have been publicly available prior to conception of the present invention. Preferably, such related polynucleotides are specifically excluded from the scope of the present invention. To list every related sequence is cumbersome. Accordingly, preferably excluded from the present invention are one or more polynucleotides comprising a nucleotide sequence described by the general formula of a-b, where a is any integer between 1 to 731 of SEQ ID NO:38, b is an integer of 15 to 745, where both a and b correspond to the positions of nucleotide residues shown in SEQ ID NO:38, and where b is greater than or equal to a+14.

Features of Protein Encoded by Gene No: 29

[0096] The translation product of this gene shares sequence homology with the leukocyte-associated Ig-like receptor-1, a putative inhibitory receptor which is thought to be important in the regulation of various physiological and cellular functions (See Genbank Accession No. gi|2352941 (AF013249).

[0097] In specific embodiments, polypeptides of the invention comprise the following amino acid sequence:

(SEQ ID NO:325)

DSPDTEPGSSAGPTQRPSDNSHNEHAPASQGLKAEHLYILIGVS,

(SEQ ID NO:326)

HRQNQIKQGPPRSKDEEQKPQQRPDLAVDVLERTADKATVNGLPEKDRET
DTSALAAGSSQEVTYAQLDHWALTQRTARAVSPQSTKPMAESITYAAVARH,

(SEQ ID NO:327)

MSPHPTALLGLVLCLAQTIHTQEEDLPRPSISAEPGTVIPLGSHVTFVCR
GPVGVQTFRLERESRSTYNDTEDVSQASPSESEARFRIDSVSEGNAGPYRCIYYKPPKWSEQSDY,

(SEQ ID NO:328)

TALLGLVLCLAQTIHTQE,

(SEQ ID NO:329)

LPRPSISAEPGTVI,

(SEQ ID NO:330)

CRGPVGVQTFRLERE,

(SEQ ID NO:331)

VLERTADKATVNGLPEKDRETDTSALAAGSS,

(SEQ ID NO:332)

AGGPRAAHPVCLCLLQSSVLALVRLRPGCTAGTWA,

(SEQ ID NO:333)

VKEMPGLIAASIISPLNGLSRVTTGAAGERNLWRPGLPGHRARLLSWTHA
EAVGQQSQ,

(SEQ ID NO:334)

LNGLSRVTTGAAGERNLWRPGLPGH,

(SEQ ID NO:335)

VKETSGGXDSPDTEPGSSAGPTQRPSDNSHNEHAPASQGLKAEHLYILIG
VS,

(SEQ ID NO:336)

TEPGSSAGPTQRPSDNSHNEHAPASQGLK,

(SEQ ID NO:337)

HRQNQIKQGPPRSKDEEQKPQQRPDLAVDVLERTADKATVNGLPEKDRET
DTS,

(SEQ ID NO:338)

PRSKDEEQKPQQRPDLAVDVLERTADKAT,

(SEQ ID NO:339)

ALAAGSSQEVTYAQLDHWALTQRTARAVSPQSTKPMAESITYAAVARH,

(SEQ ID NO:340)

AQLDHWALTQRTARAVSPQSTK,

(SEQ ID NO:341)

MSPHPTALLGLVLCLAQTIHTQEEDLPRPSISAEPGTVIPLGSHVTFVCR
GPVGVQTFRL,

(SEQ ID NO:342)

TIHTQEEDLPRPSISAEPGTVIPLGSHVTFV,

(SEQ ID NO:343)

ERESRSTYNDTEDVSQASPSESEARFRIDSVSEGNAGPYRCIYYKPPKWS
EQSDY,
and/or

(SEQ ID NO:344)

DTEDVSQASPSESEARFRIDSVSEGN.

invention

[0098] This gene is expressed primarily in macrophages and T-cells, and to a lesser extent, in human fetal heart. Therefore, polynucleotides and polypeptides of the invention are useful as reagents for differential identification of the tissue(s) or cell type(s) present in a biological sample and for diagnosis of diseases and conditions which include, but are not limited to, developmental, hematopoietic, vascular, or immune disorders. Similarly, polypeptides and antibodies directed to these polypeptides are useful in providing immunological probes for differential identification of the tissue(s) or cell type(s). For a number of disorders of the above tissues or cells, particularly of the growth and inflammatory systems, expression of this gene at significantly higher or lower levels may be routinely detected in certain tissues or cell types (e.g., developmental, hematopoietic, vascular, immune, and cancerous and wounded tissues) or bodily fluids (e.g., lymph, serum, plasma, amniotic fluid, urine, synovial fluid and spinal fluid) or another tissue or cell sample taken from an individual having such a disorder, relative to the standard gene expression level, i.e., the expression level in healthy tissue or bodily fluid from an individual not having the disorder. Preferred epitopes include those comprising a sequence shown in SEQ ID NO. 144 as residues: His-20 to Arg-28, Glu-61 to Val-74, Ser-78 to Ala-84, Lys-105 to Ser-117. The tissue distribution in fetal heart indicates that polynucleotides and polypeptides corresponding to this gene are useful for the study, diagnosis and treatment of functional disorders of the developing fetal heart, including circulatory, vascular, and inflammatory disorders. In addition, expression in macrophages and lymphocytes, combined with the homology to a putative leukocyte inhibitory receptor indicates a role in the treatment/detection of immune disorders including disorders such as arthritis, asthma, immune deficiency diseases such as AIDS, and leukemia. Moreover, the expression within fetal tissue indicates that this protein may play a role in the regulation of cellular division, and may show utility in the diagnosis and treatment of cancer and other proliferative disorders. Similarly, developmental tissues rely on decisions involving cell differentiation and/or apoptosis in pattern formation. Thus, this protein may also be involved in apoptosis or tissue differentiation and could again be useful in cancer therapy. Protein, as well as, antibodies directed against the protein may show utility as a tumor marker and/or immunotherapy targets for the above listed tissues.

[0099] Many polynucleotide sequences, such as EST sequences, are publicly available and accessible through sequence databases. Some of these sequences are related to SEQ ID NO:39 and may have been publicly available prior to conception of the present invention. Preferably, such related polynucleotides are specifically excluded from the scope of the present invention. To list every related sequence is cumbersome. Accordingly, preferably excluded from the present invention are one or more polynucleotides comprising a nucleotide sequence described by the general formula of a-b, where a is any integer between 1 to 1704 of SEQ ID NO:39, b is an integer of 15 to 1718, where both a and b correspond to the positions of nucleotide residues shown in SEQ ID NO:39, and where b is greater than or equal to a+14.

Features of Protein Encoded by Gene No: 30

[0100] The translation product of this gene shares sequence homology with erythroid cell specific transcription factor—murine which is thought to be important in normal physiological function of erythroid cells, or in the maintenance of cellular metabolism. In addition, the translation product of this gene also shares homology with the conserved 3-phosphoglycerate dehydrogenase gene which is an essential component of metabolic biosynthetic pathways (See Genbank Accession No. gi|2674062).

[0101] In specific embodiments, polypeptides of the invention comprise the following amino acid sequence:

(SEQ ID NO:345)

MNTPNGNSLSAAELTCGMIMCLARQIPQATASMKDGKWERKKFMGTELNG
KTLGILGLGRIGREVATRMQSFGMKTIGYDPIISPEVSASFGVQQLPLEE
IWPLCDFITVHTPLLPSTTGLLNDNTFAQCKKGVRVVNCARGGIVDEGAL
LRALQSGQCAGAALDVFTEEPPRDRALVDHENVISCPHLGASTKEAQSRC
GEEIAVQFVDMVKGKSLTGVVNAQALTSAFSPHTKPWIGLAEALGTLMRA
WAGSPKGTIQVITQGTSLKNAGNCLSPAVIVGLLKEASKQADVNLVNAKL
LVKEAGLNVTTSHSPAAPGEQGFGECLLAVALAGAPYQAVGLVQGTTPVL
QGLNGAVFRPEVPLRRDLPLLLFRTQTSDPAMLPTMIGLLAEAGVRLLSY
QTSLVSDGETWHVMGISSLLPSLEAWKQHVTEAFQFHF,
MAFANLRKVLISDSLDPCCRKILQ, (SEQ ID NO:346)

(SEQ ID NO:347)

GGLQVVEKQNLSKEELIA,

(SEQ ID NO:348)

MCLARQIPQATASMKDGKWERKKFMGTEL,

(SEQ ID NO:349)

ALTSAFSPHTKPWIGLAEALGTLMRAWAG,

(SEQ ID NO:350)

EVPLRRDLPLLLFRTQTSDPAMLPTMIGLLAEAGVR,

(SEQ ID NO:351)

GNSLSAAELTCGMIMCLARQIPQ,

(SEQ ID NO:352)

TASMKDGKWERKKFMGTELNGKTLGI,

(SEQ ID NO:353)

TRMQSFGMKTIGYDPIISPEVSASF,

(SEQ ID NO:354)

EEIWPLCDFITVHTPLLPSTTGLLND,

(SEQ ID NO:355)

RVVNCARGGIVDEGALLRALQSG,

(SEQ ID NO:356)

EPPRDRALVDHENVISCPHLGAST,

(SEQ ID NO:357)

VDMVKGKSLTGVVNAQALTSAFSPHT,

(SEQ ID NO:358)

GTLMRAWAGSPKGTIQVITQGTSL,

(SEQ ID NO:359)

PAVIVGLLKEASKQADVNLVNAKLL,

(SEQ ID NO:360)

HSPAAPGEQGFGECLLAVALAGAPY,

(SEQ ID NO:361)

TPVLQGLNGAVFRPEVPLRRDLPLLLF,

(SEQ ID NO:362)

TSDPAMLPTMIGLLAEAGVRLLSYQTSL,

(SEQ ID NO:363)

ACRSTLVDPKNSARAGERDXRILPSYSSAPGRTAASWLRYFYSQRPIPRP
TPA,

(SEQ ID NO:364)

VDPKNSARAGERDXRILPSYSSAPGRT,

(SEQ ID NO:365)

CRTVKALLFALPPR,

(SEQ ID NO:366)

MAFANLRKVLISDSLDPCCRKILQDGGLQVVEKQNLSKEELIAD,
and/or

(SEQ ID NO:367)

KVLISDSLDPCCRKILQDGGLQVVE.

[0102] The gene encoding the disclosed cDNA is thought to reside on chromosome 1. Accordingly, polynucleotides related to this invention are useful as a marker in linkage analysis for chromosome 1. This gene is expressed primarily in IL-1 induced smooth muscle and fetal kidney, and to a lesser extent, in myoloid progenitor cell line and bone marrow. Therefore, polynucleotides and polypeptides of the invention are useful as reagents for differential identification of the tissue(s) or cell type(s) present in a biological sample and for diagnosis of diseases and conditions which include, but are not limited to, immune, hemopoietic, or vascular disorders. Similarly, polypeptides and antibodies directed to these polypeptides are useful in providing immunological probes for differential identification of the tissue(s) or cell type(s). For a number of disorders of the above tissues or cells, particularly of the hemopoietic and immune system, expression of this gene at significantly higher or lower levels may be routinely detected in certain tissues or cell types (e.g., immune, hemopoietic, vascular, renal, metabolic, and cancerous and wounded tissues) or bodily fluids (e.g., lymph, serum, plasma, urine, synovial fluid and spinal fluid) or another tissue or cell sample taken from an individual having such a disorder, relative to the standard gene expression level, i.e., the expression level in healthy tissue or bodily fluid from an individual not having the disorder. Preferred epitopes include those comprising a sequence shown in SEQ ID NO. 145 as residues: Ala-15 to Ser-20. The tissue distribution in myeloid progenitor cell line and bone marrow, combined with the homology to an erythroid cell specific murine transcription factor indicates that polynucleotides and polypeptides corresponding to this gene are useful for the study, diagnosis and treatment of disorders and diseases involving the hemopoietic and immune systems; the maturation of progenitor cells; and the development or disorders of various smooth muscle tissues (e.g. atherosclerosis, embolism, stroke, aneurysm, microvascular disease, etc.). In addition, tissue distribution in kidney, combined with the homology to a key biosynthetic protein implicates this the protein product of this gene as being important in metabolism. Therefore, the protein may show utility in the diagnosis, prevention, and/or treatment of metabolic disorders and conditions. Protein, as well as, antibodies directed against the protein may show utility as a tumor marker and/or immunotherapy targets for the above listed tissues.

[0103] Many polynucleotide sequences, such as EST sequences, are publicly available and accessible through sequence databases. Some of these sequences are related to SEQ ID NO:40 and may have been publicly available prior to conception of the present invention. Preferably, such related polynucleotides are specifically excluded from the scope of the present invention. To list every related sequence is cumbersome. Accordingly, preferably excluded from the present invention are one or more polynucleotides comprising a nucleotide sequence described by the general formula of a-b, where a is any integer between 1 to 1952 of SEQ ID NO:40, b is an integer of 15 to 1966, where both a and b correspond to the positions of nucleotide residues shown in SEQ ID NO:40, and where b is greater than or equal to a+14.

Features of Protein Encoded by Gene No: 31

[0104] In specific embodiments, polypeptides of the invention comprise the following amino acid sequence:

(SEQ ID NO:368)

HEPSGPPDKAQDVHIHCILDPVQVK,

(SEQ ID NO:369)

ARAKWSPRQGSGCPHPLHPGPCAGEDVPTHAYSSFACHHFSNHHSSSLLR
CVRRRRRRHRRCRRRCCNHQQRXQNXRQIPHSHSVFRNPHRSQKMSQLHR
VPFFDQEDPDSYLEEEDNLPFPYPKYPRRGWGGFYQRAGLPPMWGCGATR
VYPGQSATTLSLPVT,

(SEQ ID NO:370)

SGCPHPLHPGPCAGEDVPTHAYSSFA,

(SEQ ID NO:371)

VFRNPHRSQKMSQLHRVPFFDQEDPDSYLEE,
and/or

(SEQ ID NO:372)

YQRAGLPPMWGCGATRVYPGQS.

invention.

[0105] This gene is expressed primarily in human adult testes. Therefore, polynucleotides and polypeptides of the invention are useful as reagents for differential identification of the tissue(s) or cell type(s) present in a biological sample and for diagnosis of diseases and conditions which include, but are not limited to, reproductive disorders, particularly of the male genitalia. Similarly, polypeptides and antibodies directed to these polypeptides are useful in providing immunological probes for differential identification of the tissue(s) or cell type(s). For a number of disorders of the above tissues or cells, particularly of the reproductive system, expression of this gene at significantly higher or lower levels may be routinely detected in certain tissues or cell types (e.g., reproductive, cancerous and wounded tissues) or bodily fluids (e.g., lymph, serum, plasma, seminal fluid, urine, synovial fluid and spinal fluid) or another tissue or cell sample taken from an individual having such a disorder, relative to the standard gene expression level, i.e., the expression level in healthy tissue or bodily fluid from an individual not having the disorder. Preferred epitopes include those comprising a sequence shown in SEQ ID NO. 146 as residues: Met-1 to Pro-8, Ser-45 to Thr-50. The tissue distribution in testes indicates that polynucleotides and polypeptides corresponding to this gene are useful for the study, diagnosis, treatment, and possibly prevention of various male reproductive disorders and diseases including male impotence, failed lebido and male secondary sex characteristics, infertility, and testicular cancer. Protein, as well as, antibodies directed against the protein may show utility as a tumor marker and/or immunotherapy targets for the above listed tissues.

[0106] Many polynucleotide sequences, such as EST sequences, are publicly available and accessible through sequence databases. Some of these sequences are related to SEQ ID NO:41 and may have been publicly available prior to conception of the present invention. Preferably, such related polynucleotides are specifically excluded from the scope of the present invention. To list every related sequence is cumbersome. Accordingly, preferably excluded from the present invention are one or more polynucleotides comprising a nucleotide sequence described by the general formula of a-b, where a is any integer between 1 to 958 of SEQ ID NO:41, b is an integer of 15 to 972, where both a and b correspond to the positions of nucleotide residues shown in SEQ ID NO:41, and where b is greater than or equal to a+14.

Features of Protein Encoded by Gene No: 32

[0107] In specific embodiments, polypeptides of the invention comprise the following amino acid sequence:

(SEQ ID NO:373)

WLSNPGGSGGALWFFCKEMKSGKQTMIKHVSIRDLSFGE,

SEQ ID NO:374)

ISCTPKTPSAPMAAFLSPLSLSRLSLSPHFSLSSFLDLYYVDKNPSNLLS

(SEQ ID NO:374)
LLSIASPTRIILKKEARIRHSDQKSSSLXSXGVREFRNIHTLVILVPVTV
TSLYQDPCYYLQTIFHLS,
(SEQ ID NO:375)

KTPSAPMAAFLSPLSLSRLSLSPHFS,

(SEQ ID NO:376)

NLLSLLSIASPTRIILKKEARIRHS,

(SEQ ID NO:377)

RGDTMGAHHGETQPAKQTKAKLVMGRCRMPDVRLFQGVNLLKRHRMKQCV
WKHLVNWLALYMWXIIXEKCDQTKRFHPLSWVSAIRQFIFLATASLSGPF
SXTLHGPCELFTLFLRSKSSLRKVSYVYLTPTVVTSVKGSHSGVPGXLLL
NDHEILKEELPRXAASLGVGQELLIL,

(SEQ ID NO:378)

AKQTKAKLVMGRCRMPDVRLFQGVNLLK,

(SEQ ID NO:379)

LSWVSAIRQFIFLATASLSGPFSXTLH,
and/or

(SEQ ID NO:380)

KGSHSGVPGXLLLNDHEILKEELP.

by the invention.

[0108] This gene is expressed primarily in human adult testes. Therefore, polynucleotides and polypeptides of the invention are useful as reagents for differential identification of the tissue(s) or cell type(s) present in a biological sample and for diagnosis of diseases and conditions which include, but are not limited to, reproductive disorders and cancers of the male reproductive system. Similarly, polypeptides and antibodies directed to these polypeptides are useful in providing immunological probes for differential identification of the tissue(s) or cell type(s). For a number of disorders of the above tissues or cells, particularly of the reproductive system, expression of this gene at significantly higher or lower levels may be routinely detected in certain tissues or cell types (e.g., reproductive, and cancerous and wounded tissues) or bodily fluids (e.g., lymph, serum, plasma, seminal fluid, urine, synovial fluid and spinal fluid) or another tissue or cell sample taken from an individual having such a disorder, relative to the standard gene expression level, i.e., the expression level in healthy tissue or bodily fluid from an individual not having the disorder. The tissue distribution in testes indicates that polynucleotides and polypeptides corresponding to this gene are useful for the study, diagnosis, treatment, and possibly prevention of various male reproductive disorders and diseases including male impotence, failed libido and male secondary sex characteristics, infertility, and testicular cancer. Protein, as well as, antibodies directed against the protein may show utility as a tumor marker and/or immunotherapy targets for the above listed tissues.

[0109] Many polynucleotide sequences, such as EST sequences, are publicly available and accessible through sequence databases. Some of these sequences are related to SEQ ID NO:42 and may have been publicly available prior to conception of the present invention. Preferably, such related polynucleotides are specifically excluded from the scope of the present invention. To list every related sequence is cumbersome. Accordingly, preferably excluded from the present invention are one or more polynucleotides comprising a nucleotide sequence described by the general formula of a-b, where a is any integer between 1 to 1522 of SEQ ID NO:42, b is an integer of 15 to 1536, where both a and b correspond to the positions of nucleotide residues shown in SEQ ID NO:42, and where b is greater than or equal to a+14.

Features of Protein Encoded by Gene No: 33

[0110] The translation product of this gene shares homology to the W09D10.1 protein of Caenorhabditis elegans and the phosphatidylinositol-3,4,5-triphosphate binding protein of Bos taurus (See Genbank Accession No. gnl|PID|d1020948). In addition, the gene also shares homology with the human protein hRIP, a protein known to be critical for HIV replication (See Genbank Accession Nos. gnl|PID|e1186472 and W12713).

[0111] In specific embodiments, polypeptides of the invention comprise the following amino acid sequence:

(SEQ ID NO:381)

FGTRFLANLLLEEDNKFCADCQSKGPRWASWNIGVFICIRCAXIHRNLGV
HISRVKSVNLDQWTQVQIQCMQXMGNGKANRLYEAYLPETFRRPQIDPAV
EGFIRDXYE,

(SEQ ID NO:385)

MDLLGLDAPVACSIANSKTSNTLEKDLDLLASVPSPSSSGSRKVVGSMPT
AGSAGSVPENLNLFPEPGSKSEEIGKKQLSKDSILSLYGSQTXQMPTQAM
FMAPAQMAYPTAYPSFPGVTPPNSIMGSMMPPPVGMVAQPGASGMVAPMA
MPAGYMGGMQASMMGVPNGMMTTQQAGYMAGMAAMPQTVYGVQPAQQLQW
NLTQMTQQMAGMNFYGANGMMNYGQSMSGGNGQAANQTLSPQMWK,

(SEQ ID NO:387)

MQXMGNGKANRLYEAYLPETFRRPQIDPAVEGFIRDXYE,

(SEQ ID NO:382)

EEDNKFCADCQSKGPRWASWN,

(SEQ ID NO:383)

GVFICIRCAXIHRNLGVHIS

(SEQ ID NO:384)

SVNLDQWTQVQIQCMQXMGNGKA,

(SEQ ID NO:388)

TQLLKDLFETXMRRRNTWTEVWDINAFRKEKDDKWKRGSEPVPEKKLEPV
VFEKVKMPQKKEDPQLPRKSSPKSTAPV,

(SEQ ID NO:389)

VWDPYSERMESLESCFLPISSDLLPGSGNRFRFSGTEPALPAVGMEPTTF
LEPEEEGDGTEANRSKSFSRVLLVLLFAMEQATGASRPNKSMTGAVDFGE
LFRGSCGSSFFCGIFTFSKTTGSNFFSGTGSLPLFHLSSFSFLKALMSQT
SVHVFLLLIXVSNKSFNSWVYLRSPKGLRKIGFIKSVCLSISHXLHALNL
YLSPLVEVN,

(SEQ ID NO:390)

LESCFLPISSDLLPGSGNRFRFSGTE,

(SEQ ID NO:391)

GTEANRSKSFSRVLLVLLFAME,

(SEQ ID NO:392)

GTGSLPLFHLSSFSFLKALMSQTS,

(SEQ ID NO:393)

RKIGFIKSVCLSISHXLHALNLY,

(SEQ ID NO:394)

LPFSLPFSRSADHSFMPVYPGCSVSPPFPGVRGRGPGQLSSQSLFTPLEN
SDKKTLLKRFHVWEPQFLAAFLLCMCKFLNKYCREGQ,

(SEQ ID NO:395)

MPVYPGCSVSPPFPGVRGRGPGQ,

(SEQ ID NO:396)

FGTRFLANLLLEEDNKFCADCQSKGPRWASWNIGVFICIRCAXIHRNLG
VHISRVKSVNLDQWTQVQIQC,
and/or

(SEQ ID NO:386)

MDLLGLDAPVACSIANSKTSNTLEKDLDLLASVPSPSSSGSRKVVGSMPT
AGSAGSVPENLNLFPEPGSKSEEIGKKQLSKDSILSLYGSQTXQMPTQAM
FMAPAQMAYPTAYPSFPGVTPPNSIMGSMMPPPVGMVAQPGASGMVAPMA
MPAGYMGGMQASMMGVPNGMMTTQQAGYMAGMAAMPQTVYGVQPAQQLQW
NLTQMTQQMAGMNFYGANGMMNYGQSMSGGNGQAANQTLSPQMWKFGTRF
LANLLLEEDNKFCADCQSKGPRWASWNIGVFICIRCAXIHRNLGVHISRV
KSVNLDQWTQVQIQC.

encoding these polypeptides are also encompassed by the invention.

[0112] This gene is expressed primarily in lymphoid tumors. Therefore, polynucleotides and polypeptides of the invention are useful as reagents for differential identification of the tissue(s) or cell type(s) present in a biological sample and for diagnosis of diseases and conditions which include, but are not limited to, immune and inflammatory disorders. Similarly, polypeptides and antibodies directed to these polypeptides are useful in providing immunological probes for differential identification of the tissue(s) or cell type(s). For a number of disorders of the above tissues or cells, particularly of the immune, hematopoietic and inflammatory, expression of this gene at significantly higher or lower levels may be routinely detected in certain tissues or cell types (e.g., immune, cancerous and wounded tissues) or bodily fluids (e.g., lymph, serum, plasma, urine, synovial fluid and spinal fluid) or another tissue or cell sample taken from an individual having such a disorder, relative to the standard gene expression level, i.e., the expression level in healthy tissue or bodily fluid from an individual not having the disorder. Preferred epitopes include those comprising a sequence shown in SEQ ID NO. 148 as residues: Cys-21 to Trp-28. The tissue distribution in lymphoid tumors, combined with the homology to the phosphatidylinositol-3,4,5-triphosphate binding protein indicates that the protein products of this gene are useful for the study, diagnosis and treatment of various immune disorders and diseases, including self-recognition and rejection functions of the immune system, hematopoietic disorders, and inflammatory disorders, in addition to proliferative conditions of immune cells and tissues. Homology to the W09D10.1 of C. elegans and the hRIP implicates this gene as playing a role as an essential receptor for host-viral interactions including, but not limited to retroviral infections such as AIDS. Protein, as well as, antibodies directed against the protein may show utility as a tumor marker and/or immunotherapy targets for the above listed tissues.

[0113] Many polynucleotide sequences, such as EST sequences, are publicly available and accessible through sequence databases. Some of these sequences are related to SEQ ID NO:43 and may have been publicly available prior to conception of the present invention. Preferably, such related polynucleotides are specifically excluded from the scope of the present invention. To list every related sequence is cumbersome. Accordingly, preferably excluded from the present invention are one or more polynucleotides comprising a nucleotide sequence described by the general formula of a-b, where a is any integer between 1 to 2527 of SEQ ID NO:43, b is an integer of 15 to 2541, where both a and b correspond to the positions of nucleotide residues shown in SEQ ID NO:43, and where b is greater than or equal to a+14.

Features of Protein Encoded by Gene No: 34

[0114] The translation product of this gene shares homology to an Arabidopsis thaliana recombination and DNA-damage resistance/repair protein (See Genbank Accession No. gi|166694).

[0115] In specific embodiments, polypeptides of the invention comprise the following amino acid sequence:

(SEQ ID NO:397)

KYGKVGKCVIFEIPGAPDDEAVRIFLEFERVESAIKAVVDLNGRYFGGR
VVKACFYNLDKFRVLDLA,

(SEQ ID NO:398)

KAVDLGRYFGGR,

(SEQ ID NO:399)

EAVRIEFRE,

(SEQ ID NO:400)

DLGLSCSSYTGGGMAALEDCDRGLESSS,

(SEQ ID NO:401)

TRFPGDTPFSVASPTMILPPRLLVF,

(SEQ ID NO:402)

MILCATVPPMLARKELLGPVGDLGLS,

(SEQ ID NO:403)

DLAEQV,

(SEQ ID NO:404)

EAVRIFLEFERVESAIKAVVDLNGRYFGGRV,

(SEQ ID NO:405)

QGLGKHEQGLSTALSVEKTSKRGGKIIVGDATEKGVSPGKRVTRGKGLAP
SISDMASLDPHVSAGGQ,

(SEQ ID NO:406)

LVEKDKELPRDFPYEEDSRPRSQSSK,

(SEQ ID NO:407)

LANMGGTVAHKIMQKYGFREGQGLGKHEQGLST,

(SEQ ID NO:408)

RVTRGKGLAPSISDMASLDPHVS,

(SEQ ID NO:409)

GYITSLTDASKKSDSNPLTEILKCPTKVVLLRNMVGAGEVDEDLXS,
and/or

(SEQ ID NO:410)

SLTDASKKSDSNPLTEILKCPTKVVL.

encompassed by the invention.

[0116] This gene is expressed primarily in ovarian and other cancers. Therefore, polynucleotides and polypeptides of the invention are useful as reagents for differential identification of the tissue(s) or cell type(s) present in a biological sample and for diagnosis of diseases and conditions which include, but are not limited to, cancer, particularly of the female reproductive system. Similarly, polypeptides and antibodies directed to these polypeptides are useful in providing immunological probes for differential identification of the tissue(s) or cell type(s). For a number of disorders of the above tissues or cells, particularly of the reproductive system, expression of this gene at significantly higher or lower levels may be routinely detected in certain tissues or cell types (e.g., reproductive, ovarian, and cancerous and wounded tissues) or bodily fluids (e.g., lymph, serum, plasma, urine, synovial fluid and spinal fluid) or another tissue or cell sample taken from an individual having such a disorder, relative to the standard gene expression level, i.e., the expression level in healthy tissue or bodily fluid from an individual not having the disorder. Preferred epitopes include those comprising a sequence shown in SEQ ID NO. 149 as residues: Thr-11 to Trp-19, Ala-40 to Gln-47, Lys-58 to Arg-66, Asp-98 to Lys-110, Arg-114 to Glu-121. The tissue distribution in tumors of ovarian origins combined with the homology to a known DNA damage repair enzyme indicates that polynucleotides and polypeptides corresponding to this gene are useful for the diagnosis and intervention of tumors. Protein, as well as, antibodies directed against the protein may show utility as a tumor marker and/or immunotherapy targets for the above listed tumors and tissues.

[0117] Many polynucleotide sequences, such as EST sequences, are publicly available and accessible through sequence databases. Some of these sequences are related to SEQ ID NO:44 and may have been publicly available prior to conception of the present invention. Preferably, such related polynucleotides are specifically excluded from the scope of the present invention. To list every related sequence is cumbersome. Accordingly, preferably excluded from the present invention are one or more polynucleotides comprising a nucleotide sequence described by the general formula of a-b, where a is any integer between 1 to 2404 of SEQ ID NO:44, b is an integer of 15 to 2418, where both a and b correspond to the positions of nucleotide residues shown in SEQ ID NO:44, and where b is greater than or equal to a+14.

Features of Protein Encoded by Gene No: 35

[0118] The translation product of this gene shares homology with the conserved human P1.11659_{—}4 gene which encodes the XRCC9 DNA repair gene, in addition to the F30A10.5 protein of Caenorhabditis elegans (See Genbank Accession Nos. gi|2984585 and gnl|PID|e276130, respectively).

[0119] In specific embodiments, polypeptides of the invention comprise the following amino acid sequence:

(SEQ ID NO:411)

RMGRFHRILEPGLNILIPVLDRIRYVQSLKEIVINVPEQSAVTLDNVTLQ
IDGVLYLRIMDPYKASYGVEDPEYAVTQLAQTTMRSELGKLSLDKVFRER
ESLNASIVDAINQAADCWGIRCLRYEIKDIHVPPRVKESMQMQVEAERRK
RATVLESEGTRESAINVAEGKKQAQILASEAEKAEQINQAAGEASAVLAK
AKAKAEAIRILAAALTQHNGDAAASLTVAEQYVSAFSKLAKDSNTILLPS
NPGDVTSMVAQAMGVYGALTKAPVPGTPDSLSSGSSRDVQGTDASLDEEL
DRVKMS,

(SEQ ID NO:412)

ASYGVEDPEYAVTQLAQTTMRSELGK,

(SEQ ID NO:413)

MQMQVEAERRKRATVLESEGTRESAIN,

(SEQ ID NO:414)

LTVAEQYVSAFSKLAKDSNTILLPSN,

(SEQ ID NO:415)

LLGATAPLVSLVPEVAAAVGNAGARGAXHWGPFAEGLSTGFWPR
SARASSGLPRNTVVLFVPQQEAWVVE,

(SEQ ID NO:416)

PRRASSGLPRNTVVLFVPQQEAWVVERMGRFHRILEPGLNILIPVLDRIR
YVQSLKEIVI,

(SEQ ID NO:417)

VPQQEAWVVERMGRFHRILEPGLNILIP,

(SEQ ID NO:418)

NVPEQSAVTLDNVTLQIDGVLYLRIMDPYKASYGVEDPEYAVTQLAQTTM
RSELGKLSLD,

(SEQ ID NO:419)

IDGVLYLRIMDPYKASYGVEDPEYAVTQLA,

(SEQ ID NO:420)
KVFRERESLNASIVDAINQAADCWGIRCLRYEIKDIHVPPRVKESMQMQV
,
(SEQ ID NO:421)

ASIVDAINQAADCWGIRCLRYEIKD,

(SEQ ID NO:422)

EAERRKRATVLESEGTRESAINVAEGKKQAQILASEAEKAEQINQ,

(SEQ ID NO:423)

LESEGTRESAINVAEGKKQAQILA,

(SEQ ID NO:424)

TQHNGDAAASLTVAEQYVSAFSKLAKDSNTILLPSNPGDVTSMVA,

(SEQ ID NO:425)

LTVAEQYVSAFSKLAKDSNTILLP,

(SEQ ID NO:426)

QAMGVYGALTKAPVPGTPDSLSSGSSRDVQGTDASLDEELDRVKMS,

(SEQ ID NO:427)

KAPVPGTPDSLSSGSSRDVQGTDASL,

(SEQ ID NO:429)

NAGARGAXHWGPFAEGLSTGFWPRSARAS,

(SEQ ID NO:430)

STHASGATSLLRSSRWFRRSLRRWE,
and/or

(SEQ ID NO:428)

AAAVGNAGARGAXHWGPFAEGLSTGFWPRS.

encompassed by the invention.

[0120] The gene encoding the disclosed cDNA is believed to reside on chromosome 9. Accordingly, polynucleotides related to this invention are useful as a marker in linkage analysis for chromosome 9. This gene is expressed primarily in activated T-cells. Therefore, polynucleotides and polypeptides of the invention are useful as reagents for differential identification of the tissue(s) or cell type(s) present in a biological sample and for diagnosis of diseases and conditions which include, but are not limited to, immune disorders, particularly proliferative conditions such as leukemia. Similarly, polypeptides and antibodies directed to these polypeptides are useful in providing immunological probes for differential identification of the tissue(s) or cell type(s). For a number of disorders of the above tissues or cells, particularly of the immune system, expression of this gene at significantly higher or lower levels may be routinely detected in certain tissues or cell types (e.g., immune, hematopoieitic, and cancerous and wounded tissues) or bodily fluids (e.g., lymph, serum, plasma, urine, synovial fluid and spinal fluid) or another tissue or cell sample taken from an individual having such a disorder, relative to the standard gene expression level, i.e., the expression level in healthy tissue or bodily fluid from an individual not having the disorder. Preferred epitopes include those comprising a sequence shown in SEQ ID NO. 150 as residues: Arg-23 to Pro-33, Pro-184 to Ser-189, Ala-196 to Arg-201, Glu-208 to Ser-213, Glu-230 to Ile-237, Gly-326 to Leu-331, Gly-334 to Gln-340. The tissue distribution in activated T-cells, combined with the strong homology, to the human XRCC9 DNA repair gene indicates that the protein products of this gene are useful for the treatment and diagnosis of immune or hematopoetic related disorders such as anemia, pancytopenia, leukopenia, thrombocytopenia or leukemia, since stromal cells are important in the production of cells of hematopoietic lineages. The uses include bone marrow cell ex vivo culture, bone marrow transplantation, bone marrow reconstitution, radiotherapy or chemotherapy of neoplasia. The gene product may also be involved in lymphopoiesis, therefore, it can be used in immune disorders such as infection, inflammation, allergy, immunodeficiency etc. In addition, the homology to known intestinal antigens may suggest that the protein is important in the diagnosis, treatment, and/or prevention of gastrointestinal disorders. Moreover, the protein may be useful as a detection, treatment, or possibly the prevention of a variety of immune disorders, particularly proliferative conditions, since there is a strong correlation between a cells DNA repair capacity with the incidence of aberrant cellular metabolism and regulation. Protein, as well as, antibodies directed against the protein may show utility as a tumor marker and/or immunotherapy targets for the above listed tissues.

[0121] Many polynucleotide sequences, such as EST sequences, are publicly available and accessible through sequence databases. Some of these sequences are related to SEQ ID NO:45 and may have been publicly available prior to conception of the present invention. Preferably, such related polynucleotides are specifically excluded from the scope of the present invention. To list every related sequence is cumbersome. Accordingly, preferably excluded from the present invention are one or more polynucleotides comprising a nucleotide sequence described by the general formula of a-b, where a is any integer between 1 to 1323 of SEQ ID NO:45, b is an integer of 15 to 1337, where both a and b correspond to the positions of nucleotide residues shown in SEQ ID NO:45, and where b is greater than or equal to a+14.

Features of Protein Encoded by Gene No: 36

[0122] The translation product of this gene has homology to a human estrogen receptor variant from human breast cancer. In specific embodiments, polypeptides of the invention comprise the following amino acid sequence:

(SEQ ID NO:431)

RMWRNGTHFWECKIVQPLWKTVWWFPRKLSIELPENLAILIGTYFK,

(SEQ ID NO:432)

LKRHFPKEANKHVKRCSTSLDIREIQIKIKMRY,

(SEQ ID NO:433)

HVLVRMWRNGTHFW,

(SEQ ID NO:434)

GTSGSYYLMWPIGLKPITIKEXXXXTTSNSIXK,

(SEQ ID NO:435)

AKNLKRHFPKEANKHVKRCSTSLDIREIQIKIKMRYQFILRWL,

(SEQ ID NO:436)

TMWYIPRGEYYSALKRNEVLVHATKVDEPQKHAE
and/or

(SEQ ID NO:437)

PKEANKHVKRCSTSLDIREIQIK.

[0123] This gene is expressed primarily in ulcerative colitis. Therefore, polynucleotides and polypeptides of the invention are useful as reagents for differential identification of the tissue(s) or cell type(s) present in a biological sample and for diagnosis of diseases and conditions which include, but are not limited to, gastrointestinal or metabolic disorders, in addition to intestinal ulcers, inflammatory conditions and cancers, particular of the breast. Similarly, polypeptides and antibodies directed to these polypeptides are useful in providing immunological probes for differential identification of the tissue(s) or cell type(s). For a number of disorders of the above tissues or cells, particularly of the gastrointestinal system, expression of this gene at significantly higher or lower levels may be routinely detected in certain tissues or cell types (e.g., gastrointestinal, metabolic, breast, and cancerous and wounded tissues) or bodily fluids (e.g., lymph, serum, chyme, plasma, urine, synovial fluid and spinal fluid) or another tissue or cell sample taken from an individual having such a disorder, relative to the standard gene expression level, i.e., the expression level in healthy tissue or bodily fluid from an individual not having the disorder. The tissue distribution in colon and breast origins, combined with the homology to the human estrogen receptor variant indicates that polynucleotides and polypeptides corresponding to this gene are useful for the diagnosis and intervention of tumors or other conditions within these tissues, in addition to tumors and conditions of other tissues. Protein, as well as, antibodies directed against the protein may show utility as a tumor marker and/or immunotherapy targets for the above listed tumors and tissues.

[0124] Many polynucleotide sequences, such as EST sequences, are publicly available and accessible through sequence databases. Some of these sequences are related to SEQ ID NO:46 and may have been publicly available prior to conception of the present invention. Preferably, such related polynucleotides are specifically excluded from the scope of the present invention. To list every related sequence is cumbersome. Accordingly, preferably excluded from the present invention are one or more polynucleotides comprising a nucleotide sequence described by the general formula of a-b, where a is any integer between 1 to 1262 of SEQ ID NO:46, b is an integer of 15 to 1276, where both a and b correspond to the positions of nucleotide residues shown in SEQ ID NO:46, and where b is greater than or equal to a+14.

Features of Protein Encoded by Gene No: 37

[0125] This gene is expressed primarily in epithelial cells. Therefore, polynucleotides and polypeptides of the invention are useful as reagents for differential identification of the tissue(s) or cell type(s) present in a biological sample and for diagnosis of diseases and conditions which include, but are not limited to, integumentary disorders, particularly melanoma, in addition to cancers. Similarly, polypeptides and antibodies directed to these polypeptides are useful in providing immunological probes for differential identification of the tissue(s) or cell type(s). For a number of disorders of the above tissues or cells, particularly of the skin and other epithelia, expression of this gene at significantly higher or lower levels may be routinely detected in certain tissues or cell types (e.g., integumentary, and cancerous and wounded tissues) or bodily fluids (e.g., lymph, serum, plasma, urine, synovial fluid and spinal fluid) or another tissue or cell sample taken from an individual having such a disorder, relative to the standard gene expression level, i.e., the expression level in healthy tissue or bodily fluid from an individual not having the disorder. Preferred epitopes include those comprising a sequence shown in SEQ ID NO. 152 as residues: Met-1 to Tyr-6. The tissue distribution in epithelial tissue indicates that polynucleotides and polypeptides corresponding to this gene are useful for diagnosis and intervention of tumors of this tissue. Moreover, the protein product of this gene is useful for the treatment, diagnosis, and/or prevention of various skin disorders including congenital disorders (i.e. nevi, moles, freckles, Mongolian spots, hemangiomas, port-wine syndrome), integumentary tumors (i.e. keratoses, Bowen's disease, basal cell carcinoma, squamous cell carcinoma, malignant melanoma, Paget's disease, mycosis fungoides, and Kaposi's sarcoma), injuries and inflammation of the skin (i.e. wounds, rashes, prickly heat disorder, psoriasis, dermatitis), atherosclerosis, uticaria, eczema, photosensitivity, autoimmune disorders (i.e. lupus erythematosus, vitiligo, dermatomyositis, morphea, scleroderma, pemphigoid, and pemphigus), keloids, striae, erythema, petechiae, purpura, and xanthelasma. In addition, such disorders may predispose increased susceptibility to viral and bacterial infections of the skin (i.e. cold sores, warts, chickenpox, molluscum contagiosum, herpes zoster, boils, cellulitis, erysipelas, impetigo, tinea, althletes foot, and ringworm). Moreover, the protein product of this gene may also be useful for the treatment or diagnosis of various connective tissue disorders such as arthritis, trauma, tendonitis, chrondomalacia and inflammation, autoimmune disorders such as rheumatoid arthritis, lupus, scleroderma, and dermatomyositis as well as dwarfism, spinal deformation, and specific joint abnormalities as well as chondrodysplasias (i.e. spondyloepiphyseal dysplasia congenita, familial osteoarthritis, Atelosteogenesis type II, metaphyseal chondrodysplasia type Schmid). Protein, as well as, antibodies directed against the protein may show utility as a tumor marker and/or immunotherapy targets for the above listed tissues.

[0126] Many polynucleotide sequences, such as EST sequences, are publicly available and accessible through sequence databases. Some of these sequences are related to SEQ ID NO:47 and may have been publicly available prior to conception of the present invention. Preferably, such related polynucleotides are specifically excluded from the scope of the present invention. To list every related sequence is cumbersome. Accordingly, preferably excluded from the present invention are one or more polynucleotides comprising a nucleotide sequence described by the general formula of a-b, where a is any integer between 1 to 1268 of SEQ ID NO:47, b is an integer of 15 to 1282, where both a and b correspond to the positions of nucleotide residues shown in SEQ ID NO:47, and where b is greater than or equal to a+14.

Features of Protein Encoded by Gene No: 38

[0127] This gene is expressed primarily in adult retina. Therefore, polynucleotides and polypeptides of the invention are useful as reagents for differential identification of the tissue(s) or cell type(s) present in a biological sample and for diagnosis of diseases and conditions which include, but are not limited to, diseases of the eye. Similarly, polypeptides and antibodies directed to these polypeptides are useful in providing immunological probes for differential identification of the tissue(s) or cell type(s). For a number of disorders of the above tissues or cells, particularly of the eye, expression of this gene at significantly higher or lower levels may be routinely detected in certain tissues or cell types (e.g., visual, and cancerous and wounded tissues) or bodily fluids (e.g., lymph, serum, aqueous humor, vitreous humor, plasma, urine, synovial fluid and spinal fluid) or another tissue or cell sample taken from an individual having such a disorder, relative to the standard gene expression level, i.e., the expression level in healthy tissue or bodily fluid from an individual not having the disorder. Preferred epitopes include those comprising a sequence shown in SEQ ID NO. 153 as residues: Cys-14 to Lys-21. The tissue distribution in the adult retina indicates that polynucleotides and polypeptides corresponding to this gene are useful for the treatment and diagnosis of disorders of the eye. Protein, as well as, antibodies directed against the protein may show utility as a tumor marker and/or immunotherapy targets for the above listed tissues.

[0128] Many polynucleotide sequences, such as EST sequences, are publicly available and accessible through sequence databases. Some of these sequences are related to SEQ ID NO:48 and may have been publicly available prior to conception of the present invention. Preferably, such related polynucleotides are specifically excluded from the scope of the present invention. To list every related sequence is cumbersome. Accordingly, preferably excluded from the present invention are one or more polynucleotides comprising a nucleotide sequence described by the general formula of a-b, where a is any integer between 1 to 631 of SEQ ID NO:48, b is an integer of 15 to 645, where both a and b correspond to the positions of nucleotide residues shown in SEQ ID NO:48, and where b is greater than or equal to a+14.

Features of Protein Encoded by Gene No: 39

[0129] In specific embodiments, polypeptides of the invention comprise the following amino acid sequence:

(SEQ ID NO:438)

VEMRRWPPSKNFTFTSSLSLSSLTALLQEKLLLSVSRRHAALSVCVLTHH
LDGRILVTTETTFYKSKLKGTASSSVLGRGG,

(SEQ ID NO:439)

PPSKNFTFTSSLSLSSLTALLQ,

(SEQ ID NO:440)

DGRILVTTETTFYKSKLKGTA,
and/or

(SEQ ID NO:441)

VENSRKA.

[0130] This gene is expressed primarily in bone marrow and fetal liver. Therefore, polynucleotides and polypeptides of the invention are useful as reagents for differential identification of the tissue(s) or cell type(s) present in a biological sample and for diagnosis of diseases and conditions which include, but are not limited to, immune, haemopoietic, or hepatatic disorders. Similarly, polypeptides and antibodies directed to these polypeptides are useful in providing immunological probes for differential identification of the tissue(s) or cell type(s). For a number of disorders of the above tissues or cells, particularly of the haemopoietic system, expression of this gene at significantly higher or lower levels may be routinely detected in certain tissues or cell types (e.g., immune, haemopoietic, hepatatic, metabolic, and cancerous and wounded tissues) or bodily fluids (e.g., lymph, serum, bile, plasma, urine, synovial fluid and spinal fluid) or another tissue or cell sample taken from an individual having such a disorder, relative to the standard gene expression level, i.e., the expression level in healthy tissue or bodily fluid from an individual not having the disorder. The tissue distribution in bone marrow and fetal liver indicates that polynucleotides and polypeptides corresponding to this gene are useful for the treatment and diagnosis of disorders of the haemopoietic system. Moreover, the protein product of this gene is useful for the treatment and diagnosis of hematopoietic related disorders such as anemia, pancytopenia, leukopenia, thrombocytopenia or leukemia since stromal cells are important in the production of cells of hematopoietic lineages. The uses include bone marrow cell ex vivo culture, bone marrow transplantation, bone marrow reconstitution, radiotherapy or chemotherapy of neoplasia. The gene product may also be involved in lymphopoiesis, therefore, it can be used in immune disorders such as infection, inflammation, allergy, immunodeficiency etc. In addition, this gene product may have commercial utility in the expansion of stem cells and committed progenitors of various blood lineages, and in the differentiation and/or proliferation of various cell types. Expression within fetal tissue indicates that this protein may play a role in the regulation of cellular division, and may show utility in the diagnosis and treatment of cancer and other proliferative disorders. Similarly, developmental tissues rely on decisions involving cell differentiation and/or apoptosis in pattern formation. Thus this protein may also be involved in apoptosis or tissue differentiation and could again be useful in cancer therapy. Protein, as well as, antibodies directed against the protein may show utility as a tumor marker and/or immunotherapy targets for the above listed tissues.

[0131] Many polynucleotide sequences, such as EST sequences, are publicly available and accessible through sequence databases. Some of these sequences are related to SEQ ID NO:49 and may have been publicly available prior to conception of the present invention. Preferably, such related polynucleotides are specifically excluded from the scope of the present invention. To list every related sequence is cumbersome. Accordingly, preferably excluded from the present invention are one or more polynucleotides comprising a nucleotide sequence described by the general formula of a-b, where a is any integer between 1 to 1481 of SEQ ID NO:49, b is an integer of 15 to 1495, where both a and b correspond to the positions of nucleotide residues shown in SEQ ID NO:49, and where b is greater than or equal to a+14.

Features of Protein Encoded by Gene No: 40

[0132] This gene is expressed primarily in lymph node, fetal liver, and brain. Therefore, polynucleotides and polypeptides of the invention are useful as reagents for differential identification of the tissue(s) or cell type(s) present in a biological sample and for diagnosis of diseases and conditions which include, but are not limited to, haemopoietic or immune disorders, and disorders of the CNS. Similarly, polypeptides and antibodies directed to these polypeptides are useful in providing immunological probes for differential identification of the tissue(s) or cell type(s). For a number of disorders of the above tissues or cells, particularly of the haemopoietic and CNS, expression of this gene at significantly higher or lower levels may be routinely detected in certain tissues or cell types (e.g., haemopoietic, immune, neural, and cancerous and wounded tissues) or bodily fluids (e.g., lymph, serum, amniotic fluid, plasma, urine, synovial fluid and spinal fluid) or another tissue or cell sample taken from an individual having such a disorder, relative to the standard gene expression level, i.e., the expression level in healthy tissue or bodily fluid from an individual not having the disorder. The tissue distribution in fetal tissue and other cellular sources marked by proliferating cells indicates that this protein may play a role in the regulation or cellular division. Additionally, the expression in hematopoietic cells and tissues indicates that this protein may play a role in the proliferation, differentiation, and/or survival of hematopoietic cell lineages.

[0133] Thus, this gene may be useful in the treatment of lymphoproliferative disorders, and in the maintenance and differentiation of various hematopoietic lineages from early hematopoietic stem and committed progenitor cells. In addition, polynucleotides and polypeptides corresponding to this gene are useful for the detection treatment of neurodegenerative disease states and behavioral disorders such as Alzheimers Disease, Parkinsons Disease, Huntingtons Disease, schizophrenia, mania, dementia, paranoia, obsessive compulsive disorder, panic disorder, and autism. In addition, the gene or gene product may also play a role in the treatment and/or detection of developmental disorders associated with the developing embryo, sexually-linked disorders, or disorders of the cardiovascular system. Protein, as well as, antibodies directed against the protein may show utility as a tumor marker and/or immunotherapy targets for the above listed tissues.

[0134] Many polynucleotide sequences, such as EST sequences, are publicly available and accessible through sequence databases. Some of these sequences are related to SEQ ID NO:50 and may have been publicly available prior to conception of the present invention. Preferably, such related polynucleotides are specifically excluded from the scope of the present invention. To list every related sequence is cumbersome. Accordingly, preferably excluded from the present invention are one or more polynucleotides comprising a nucleotide sequence described by the general formula of a-b, where a is any integer between 1 to 1616 of SEQ ID NO:50, b is an integer of 15 to 1630, where both a and b correspond to the positions of nucleotide residues shown in SEQ ID NO:50, and where b is greater than or equal to a+14.

Features of Protein Encoded by Gene No: 41

[0135] The translation product of this gene shares sequence homology with fibropellin and epidermal growth factors, and the rat Notch2 protein which are thought to be important in growth and regeneration of epidermal cells (See Genbank Accession Nos. WI 1719, gi|310660, and pir|A49128|A49128, respectively).

[0136] In specific embodiments, polypeptides of the invention comprise the following amino acid sequence:

(SEQ ID NO:442)

GTRPGESHANDLECSGKGKCTTKPSEATFSCTCEEQYVGTFCEEYDACQR
KPCQNNASCIDANEKQDGSNFTCVCLPGYTGELCQSKIDYCILDPCRNGA
TCISSLSGFTCQDPEGYFGSACEEKVDPCASSPCQNNGTCYVDGVHFTCN
CSPGFTGPTCAQLIDFCALSPCAHGTCRSVGTSYKCLCDPGYHGLYCEEE
YNECLSAPCLNAATCRDLVNGYECVCLAEYKGTHCELYKDPCANVSCLNG
ATCDSDGLNGTCICAPGFTGEECDIDINECDSNPCHHGGSCLDQPNGYNC
HCPHGWVGANCEIHLQWKSGHMAESLTN.

(SEQ ID NO:443)

GKCTTKPSEATFSCTCEEQYVGTFC,

(SEQ ID NO:444)

CAHGTCRSVGTSYKCLCDPGYH,

(SEQ ID NO:445)

CANVSCLNGATCDSDGLNGTCICAPGFTGEECD,

(SEQ ID NO:446)

HANDLECSGKGKCTTKPSEATFSCTCE,

(SEQ ID NO:447)

YVGTFCEEYDACQRKPCQNNASCIDA,

(SEQ ID NO:448)

GYTGELCQSKIDYCILDPCRNGA,

(SEQ ID NO:449)

CPEGYFGSACEEKVDPCASSPCQNN,

(SEQ ID NO:450)

CSPGFTGPTCAQLIDFCALSPC,

(SEQ ID NO:451)

GTCRSVGTSYKCLCDPGYHGLYCEE,

(SEQ ID NO:452)

DQPNGYNCHCPHGWVGANCEIHLQWK,

(SEQ ID NO:453)

PPFRLQGDWSSWRE,

(SEQ ID NO:454)

THAEMEQHAFPVSVDSPASVQKDTSDLLVKKRWTPAPRLRARTTAPAMWT
GYTLPATAARASQGRPVPSLLTSVPSAPVLMARAAAWAPATNASVIQVTM
ASTVRRNIMSASPLHA,

(SEQ ID NO:455)

EQHAFPVSVDSPASVQKDTSDL,

(SEQ ID NO:456)

PAPRLRARTTAPAMWTGYTLPA,

(SEQ ID NO:457)

VPSLLTSVPSAPVLMARAA,

(SEQ ID NO:458)

VIQVTMASTVRRNIMSASPLH,

(SEQ ID NO:459)

EMLALGNNHFIGFVNDSVTKSIVALRLTLVVKVST,

(SEQ ID NO:460)

SGKGKCTTKPSEATFSCTCEEQYVGTFCEEYDACQRKPCQNNASCIDANE
KQDGSNFTCV,

(SEQ ID NO:461)

ATFSCTCEEQYVGTFCEEYDACQRKPCQNNA,

(SEQ ID NO:462)

CLPGYTGELCQSKIDYCILDPCRNGATCISSLSGFTCQCPEGYFGSACEE
KVDPCASSPC,

(SEQ ID NQ:463)

YCILDPCRNGATCISSLSGFTCQCPEGY,

(SEQ ID NO:464)

QNNGTCYVDGVHTCNCSPGFTGPTCAQLIDFCALSPCAHGTCRSVGTSYK
CLCDPGYHG,

(SEQ ID NO:465)

CNCSPGFTGTCAQLIDFCALSPCAHG,

(SEQ ID NO:466)

LYCEEEYNECLSAPCLNAATCRDLVNGYECVCLAEYKGTHCELYKDPCAN
VSCLNGATCD,

(SEQ ID NO:467)

PCLNAATCRDLVNGYECVCLAEYK,

(SEQ ID NO:468)

SDGLNGTCICAPGFTGEECDIDINECDSNPCHHGGSCLDQPNGYNXHCPH
GWVGANCEIH,

(SEQ ID NO:469)

GEECDIDINECDSNPCHHGGSCL,

(SEQ ID NO:470)

FYNCRSLDSEFSNAIASIRHARFGKKSRPAMYDVSPIAYEDYSPDDKPLV
TLIKTKDL,

(SEQ ID NO:471)

ASLRHARFGKKSRPAMYDVSPIAYEDY,
and/or

(SEQ ID NO:472)

QQCSLIDGRSVTPLQASGGLVLLE.

Polynucleotides encoding these polypeptides are also encompassed by the invention.

[0137] The gene encoding the disclosed cDNA is believed to reside on chromosome 2. Accordingly, polynucleotides related to this invention are useful as a marker in linkage analysis for chromosome 2. This gene is expressed primarily in brain and kidney. Therefore, polynucleotides and polypeptides of the invention are useful as reagents for differential identification of the tissue(s) or cell type(s) present in a biological sample and for diagnosis of diseases and conditions which include, but are not limited to, disorders of the neural and renal systems, particularly growth disorders such as cancer. Similarly, polypeptides and antibodies directed to these polypeptides are useful in providing immunological probes for differential identification of the tissue(s) or cell type(s). For a number of disorders of the above tissues or cells, particularly of the neural and renal systems, expression of this gene at significantly higher or lower levels may be routinely detected in certain tissues or cell types (e.g., renal, neural, developmental, and cancerous and wounded tissues) or bodily fluids (e.g., lymph, serum, plasma, urine, synovial fluid and spinal fluid) or another tissue or cell sample taken from an individual having such a disorder, relative to the standard gene expression level, i.e., the expression level in healthy tissue or bodily fluid from an individual not having the disorder. The tissue distribution in brain and kidney, combined with the homology to epidermal growth factor and notch2 protein indicates that polynucleotides and polypeptides corresponding to this gene are useful for the diagnosis and treatment of growth disorders, especially in the neural and renal systems. In addition, polynucleotides and polypeptides corresponding to this gene are useful for the detection/treatment of neurodegenerative disease states and behavioral disorders such as Alzheimers Disease, Parkinsons Disease, Huntingtons Disease, schizophrenia, mania, dementia, paranoia, obsessive compulsive disorder, panic disorder, and autism. In addition, the gene or gene product may also play a role in the treatment and/or detection of developmental disorders associated with the developing embryo, sexually-linked disorders, or disorders of the cardiovascular system. Moreover, the protein may also show utility in the treatment, detection, and/or prevention of a variety of integumentary disorders, particularly those which derive from aberrant structure or function of the apical lamina, the extracellular matrix, or the basal lamina, in addition to their relation to proper development, particularly during gastrulation. Protein, as well as, antibodies directed against the protein may show utility as a tumor marker and/or immunotherapy targets for the above listed tissues.

[0138] Many polynucleotide sequences, such as EST sequences, are publicly available and accessible through sequence databases. Some of these sequences are related to SEQ ID NO:51 and may have been publicly available prior to conception of the present invention. Preferably, such related polynucleotides are specifically excluded from the scope of the present invention. To list every related sequence is cumbersome. Accordingly, preferably excluded from the present invention are one or more polynucleotides comprising a nucleotide sequence described by the general formula of a-b, where a is any integer between 1 to 2406 of SEQ ID NO:51, b is an integer of 15 to 2420, where both a and b correspond to the positions of nucleotide residues shown in SEQ ID NO:51, and where b is greater than or equal to a+14.

Features of Protein Encoded by Gene No: 42

[0139] In specific embodiments, polypeptides of the invention comprise the following amino acid sequence: PNGSSNVCVSLCVFVCVCALKTSNSLEAWGGIPALPLACL (SEQ ID NO:473), and/or LCVFVCVCALKTSNSLEAWGGIP (SEQ ID NO:474). Polynucleotides encoding these polypeptides are also encompassed by the invention.

[0140] The gene encoding the disclosed cDNA is believed to reside on chromosome 15. Accordingly, polynucleotides related to this invention are useful as a marker in linkage analysis for chromosome 15. This gene is expressed primarily in brain, kidney and stromal cells. Therefore, polynucleotides and polypeptides of the invention are useful as reagents for differential identification of the tissue(s) or cell type(s) present in a biological sample and for diagnosis of diseases and conditions which include, but are not limited to, immune, haemopoietic, renal, or neural disorders. Similarly, polypeptides and antibodies directed to these polypeptides are useful in providing immunological probes for differential identification of the tissue(s) or cell type(s). For a number of disorders of the above tissues or cells, particularly of the haemopoietic, renal and central nervous system, expression of this gene at significantly higher or lower levels may be routinely detected in certain tissues or cell types (e.g., immune, haemopoietic, neural, renal, urogenital, and cancerous and wounded tissues) or bodily fluids (e.g., lymph, serum, plasma, urine, synovial fluid and spinal fluid) or another tissue or cell sample taken from an individual having such a disorder, relative to the standard gene expression level, i.e., the expression level in healthy tissue or bodily fluid from an individual not having the disorder. Preferred epitopes include those comprising a sequence shown in SEQ ID NO. 157 as residues: Lys-71 to Trp-76, Glu-99 to Gly-108, Arg-142 to Ser-149. The tissue distribution in brain indicates that polynucleotides and polypeptides corresponding to this gene are useful for the detection/treatment of neurodegenerative disease states and behavioral disorders such as Alzheimers Disease, Parkinsons Disease, Huntingtons Disease, schizophrenia, mania, dementia, paranoia, obsessive compulsive disorder, panic disorder, and autism. In addition, the gene or gene product may also play a role in the treatment and/or detection of developmental disorders associated with the developing embryo, sexually-linked disorders, or disorders of the cardiovascular system. Moreover, the protein product of this gene is useful for the treatment and diagnosis of hematopoetic related disorders such as anemia, pancytopenia, leukopenia, thrombocytopenia or leukemia since stromal cells are important in the production of cells of hematopoietic lineages. The uses include bone marrow cell ex vivo culture, bone marrow transplantation, bone marrow reconstitution, radiotherapy or chemotherapy of neoplasia. The gene product is thought to be involved in lymphopoiesis, therefore, it can be used in immune disorders to modulate infection, inflammation, allergy, immunodeficiency, etc. Alternatively, this gene or gene product could be used in the treatment and/or detection of kidney diseases including renal failure, nephritus, renal tubular acidosis, proteinuria, pyuria, edema, pyelonephritis, hydronephritis, nephrotic syndrome, crush syndrome, glomerulonephritis, hematuria, renal colic and kidney stones, in addition to Wilm's Tumor Disease, and congenital kidney abnormalities such as horseshoe kidney, polycystic kidney, and Falconi's syndrome. Protein, as well as, antibodies directed against the protein may show utility as a tumor marker and/or immunotherapy targets for the above listed tissues.

[0141] Many polynucleotide sequences, such as EST sequences, are publicly available and accessible through sequence databases. Some of these sequences are related to SEQ ID NO:52 and may have been publicly available prior to conception of the present invention. Preferably, such related polynucleotides are specifically excluded from the scope of the present invention. To list every related sequence is cumbersome. Accordingly, preferably excluded from the present invention are one or more polynucleotides comprising a nucleotide sequence described by the general formula of a-b, where a is any integer between 1 to 1158 of SEQ ID NO:52, b is an integer of 15 to 1172, where both a and b correspond to the positions of nucleotide residues shown in SEQ ID NO:52, and where b is greater than or equal to a+14.

Features of Protein Encoded by Gene No: 43

[0142] The gene product above share sequence similarity with prohibitin, in addition to the human B-cell receptor associated protein (See Genbank Accession No. gi|1922935). Thus, these polypeptides are expected to share biological activities with prohibitin. These activities are known in the art include, though are not limited to, the following: antiproliferative activities, particularly for neoplasias.

[0143] In specific embodiments, polypeptides of the invention comprise the following amino acid sequence:

(SEQ ID NO:475)

MAQNLKDLAGRLPAGRGMGTALKLLLGAGAVAYGVRESVFTVEGGHRAIF
FNRIGGVQQDTILAEGLHFRIPWFQYPIIYDIRARPRKISSPTGSKDLQM
VNISLRVLSRPNAQELPSMYQRLGLDYEERVLPSIVNEVLKSVVAKFNAS
QLLTQRAQVSLLLRRELTERAKDFSLILDDVAITELSFSREYTAAVEAKQ
VAQQEAQRAQFLVEKAKQEQRQKIVQAEGEAEAAKMLGEALSKNPGYIKL
RKIRAAQNISKTIATSQNRIYLTADNLVLNLQDESFVRGSDSLIKGKK,

(SEQ ID NO:476)

PPVPPASRSD,

(SEQ ID NO:477)

MAQNLKDLAGRLPAGPR,

(SEQ ID NO:478)

YGVRESVFTVEGGHRALFFNRIGGVQQ,

(SEQ ID NO:479)

DTILAEGLHFRIPWFQYPIIYDIRARPRKISSTGSKDLQMVNISLRVLSR
PNAQELPSM,

(SEQ ID NO:480)

WFQYPIIYDIRARPRKISSPTGSKDLQMV,

(SEQ ID NO:481)

YQRLGLDYEERVLPSIVNEVLKSVVAKFNASQLITQRAQVSLLIRRELTE
RAKDFSLILD,

(SEQ ID NO:482)

VNEVLKSVVAKFNASQLITQRAQVSL,

(SEQ ID NO:483)

DVAITELSFSREYT,

(SEQ ID NO:484)

FLVEKAKQEQRQKIVQAEGEAEAAKMLGE,

(SEQ ID NO:485)

ALSKNPGYIKLRKIRAAQNISKTIATSQNRIYLTADNLVLNLQDESFTRG
SDSLIKGKK,
and/or

(SEQ ID NO:486)

KIRAAQNISKTIATSQNRIYLTADNLV.

invention.

[0144] The gene encoding the disclosed cDNA is believed to reside on chromosome 12. Accordingly, polynucleotides related to this invention are useful as a marker in linkage analysis for chromosome 12. This gene is expressed primarily in fetal brain. Therefore, polynucleotides and polypeptides of the invention are useful as reagents for differential identification of the tissue(s) or cell type(s) present in a biological sample and for diagnosis of diseases and conditions which include, but are not limited to, neural diseases, particularly proliferative conditions such as cancers or tumors. Similarly, polypeptides and antibodies directed to these polypeptides are useful in providing immunological probes for differential identification of the tissue(s) or cell type(s). For a number of disorders of the above tissues or cells, particularly of the nervous system, expression of this gene at significantly higher or lower levels may be routinely detected in certain tissues or cell types (e.g., neural, and cancerous and wounded tissues) or bodily fluids (e.g., lymph, serum, plasma, urine, synovial fluid and spinal fluid) or another tissue or cell sample taken from an individual having such a disorder, relative to the standard gene expression level, i.e., the expression level in healthy tissue or bodily fluid from an individual not having the disorder. Preferred epitopes include those comprising a sequence shown in SEQ ID NO. 158 as residues: Ala-85 to Ser-91, Pro-93 to Asp-98, Glu-167 to Lys-173, Gln-205 to Ala-210. The tissue distribution in fetal brain, combined with the homology to prohibitin and the B-cell receptor associated protein indicates that the protein products of this gene are useful for the detection/treatment of neurodegenerative disease states and behavioral disorders such as Alzheimers Disease, Parkinsons Disease, Huntingtons Disease, schizophrenia, mania, dementia, paranoia, obsessive compulsive disorder, panic disorder, and autism. In addition, the gene or gene product may also play a role in the treatment and/or detection of developmental disorders associated with the developing embryo, sexually-linked disorders, and/or disorders of the cardiovascular system. Similarly, expression within fetal tissue indicates that this protein may play a role in the regulation of cellular division, and may show utility in the diagnosis and treatment of cancer and other proliferative disorders. Similarly, developmental tissues rely on decisions involving cell differentiation and/or apoptosis in pattern formation. Thus this protein may also be involved in apoptosis or tissue differentiation and could again be useful in cancer therapy. Protein, as well as, antibodies directed against the protein may show utility as a tumor marker and/or immunotherapy targets for the above listed tissues.

[0145] Many polynucleotide sequences, such as EST sequences, are publicly available and accessible through sequence databases. Some of these sequences are related to SEQ ID NO:53 and may have been publicly available prior to conception of the present invention. Preferably, such related polynucleotides are specifically excluded from the scope of the present invention. To list every related sequence is cumbersome. Accordingly, preferably excluded from the present invention are one or more polynucleotides comprising a nucleotide sequence described by the general formula of a-b, where a is any integer between 1 to 1575 of SEQ ID NO:53, b is an integer of 15 to 1589, where both a and b correspond to the positions of nucleotide residues shown in SEQ ID NO:53, and where b is greater than or equal to a+14.

Features of Protein Encoded by Gene No: 44

[0146] The translation product of this gene shares sequence homology with the F44G4.1 gene of the c. elegans genome which has no known function (See Genbank Accession No. gnl|PID|e236516). Moreover, the translation product of this gene also shares sequence homology with the human torsionA and torsionB gene products, a gene candidate for the Torsion Dystonia disease locus (See Genbank Accession Nos. gi|2358279 (AF007871) and gi|2358281 (AF007872)).

(SEQ ID NO:487)

KALALSFHGWSGTGKNFV,

(SEQ ID NO:488)

NLIDYFLPFLPLEYRHVRLCAR,

(SEQ ID NO:489),

NLIDYFIPFLPLEYRHVRLC,

(SEQ ID NO:490)

CHQTLFIFDEAEKLHPGLLEVLGPHL,

(SEQ ID NO:491)

PEKALALSFHGWSGTGKNFVA,

(SEQ ID NO:492)

GSLARPAAGWSRSSGPA,

(SEQ ID NO:493)

DAKETIWSVIISPWDLLSSHMAFFNHLAHFLQPHSTLECVSLRHQVILRM
GSVFEFSNPSSYLSRWDLQKKEKGLAWLLM,

(SEQ ID NO:494)

NHLAHFLQPHSTLECVSLRHQVILRMG,

(SEQ ID NO:495)

MSRPPIVFEKVPPPPPKSVDHKSWPTLTWFVKYLPLCTFPFSLRLLADSU
ITEAAWLSSGSTNLKAHQPANLECILHPWVTELRSPRLCNPRTLQPLRPN
TQALPCRRAEMLRRPSGVS,
and/or

(SEQ ID NQ:496)

HQPANLECLLHPWVTELRSPRLCNPRTLQP.

Polynucleotides encoding these polypeptides are also encompassed by the invention.

[0147] This gene is expressed primarily in tonsils. Therefore, polynucleotides and polypeptides of the invention are useful as reagents for differential identification of the tissue(s) or cell type(s) present in a biological sample and for diagnosis of diseases and conditions which include, but are not limited to, immune or hematopoietic disorders, particularly tonsillitis or adnoiditis. Similarly, polypeptides and antibodies directed to these polypeptides are useful in providing immunological probes for differential identification of the tissue(s) or cell type(s). For a number of disorders of the above tissues or cells, particularly of the immune system, expression of this gene at significantly higher or lower levels may be routinely detected in certain tissues or cell types (e.g., immune, hematopoietic, and cancerous and wounded tissues) or bodily fluids (e.g., lymph, serum, plasma, urine, synovial fluid and spinal fluid) or another tissue or cell sample taken from an individual having such a disorder, relative to the standard gene expression level, i.e., the expression level in healthy tissue or bodily fluid from an individual not having the disorder. The tissue distribution in tonsils, combined with the homology to F44G4.1 gene of the C. elegans and the torsion a and B proteins indicates that polynucleotides and polypeptides corresponding to this gene are useful for the treatment and detection of conditions affecting the tonsils. The tonsils have not been thoroughly studied and the actual function of this organ is not known, but this gene could be used in determining what may trigger tonsillitis, especially in children, where the tonsils seem to be most active. Furthermore, due to the homology of this gene, it may display potential utility in the detection, diagnosis, and/or treatment for Torsion Dystonia disease. Additionally, considering the high conservation of the torsian a and B proteins, in addition to their homology to ATP binding domains and heat shock protein resemblance, an essential function may be attributed to the current invention—potentially within the context of a developmental, metabolic, or signaling role in various tissues, which specifically includes immune cells and tissues. The protein may also show utility in the treatment, detection, and/or prevention of a variety of muscular degenerative or neurodegenerative conditions. Protein, as well as, antibodies directed against the protein may show utility as a tumor marker and/or immunotherapy targets for the above listed tissues.

[0148] Many polynucleotide sequences, such as EST sequences, are publicly available and accessible through sequence databases. Some of these sequences are related to SEQ ID NO:54 and may have been publicly available prior to conception of the present invention. Preferably, such related polynucleotides are specifically excluded from the scope of the present invention. To list every related sequence is cumbersome. Accordingly, preferably excluded from the present invention are one or more polynucleotides comprising a nucleotide sequence described by the general formula of a-b, where a is any integer between 1 to 2060 of SEQ ID NO:54, b is an integer of 15 to 2074, where both a and b correspond to the positions of nucleotide residues shown in SEQ ID NO:54, and where b is greater than or equal to a+14.

Features of Protein Encoded by Gene No: 45

[0149] The translation product of this gene was found to have homology to a protein from Schizosaccharomyces pombe, which, based upon its level of conservation, may be attributed to having an essential cellular function (See Genbank Accession No. gnl|PID|e339908).

[0150] In specific embodiments, polypeptides of the invention comprise the following amino acid sequence:

(SEQ ID NO:496)

NSXRAWRRHVPCGGGREIAWTSGRPRTA.

(SEQ ID NO:498)

VSIFSTDIHPNNKSNTIAIEFTIINGTLITVLTDRIRFISCDLIPGSSPN
PPIPWSVPQPMFLRNRSSCSTAMALTQSRXACSSEYRVKAMAVRGRPEVQ
AISLPPPQGTWRLHARXEF,
and/or

(SEQ ID NO:499)

QPMFLRNRSSCSTAMALTQSRXACSSEYRV.

Polynucleotides encoding these polypeptides are also encompassed by the invention.

[0151] The gene encoding the disclosed cDNA is believed to reside on chromosome 18. Accordingly, polynucleotides related to this invention are useful as a marker in linkage analysis for chromosome 18. This gene is expressed primarily in osteoclastoma stromal cells, and to a lesser extent, in T-cells. Therefore, polynucleotides and polypeptides of the invention are useful as reagents for differential identification of the tissue(s)- or cell type(s) present in a biological sample and for diagnosis of diseases and conditions which include, but are not limited to, immune, haemopoietic, or skeletal disorders, particularly proliferative conditions, such as leukemia. Similarly, polypeptides and antibodies directed to these polypeptides are useful in providing immunological probes for differential identification of the tissue(s) or cell type(s). For a number of disorders of the above tissues or cells, particularly of the haemo-lymphoid system, expression of this gene at significantly higher or lower levels may be routinely detected in certain tissues or cell types (e.g., immune, hematopoietic, skeletal, and cancerous and wounded tissues) or bodily fluids (e.g., lymph, serum, plasma, urine, synovial fluid and spinal fluid) or another tissue or cell sample taken from an individual having such a disorder, relative to the standard gene expression level, i.e., the expression level in healthy tissue or bodily fluid from an individual not having the disorder. The tissue distribution in stromal and T-cells indicates that polynucleotides and polypeptides corresponding to this gene are useful for the diagnosis, treatment, and/or prevention of immune or hematopoietic diseases, such as leukemia. Moreover, the protein product of this gene is useful for the treatment and diagnosis of hematopoietic related disorders such as anemia, pancytopenia, leukopenia, thrombocytopenia or leukemia since stromal cells are important in the production of cells of hematopoietic lineages. The uses include bone marrow cell ex vivo culture, bone marrow transplantation, bone marrow reconstitution, radiotherapy or chemotherapy of neoplasia. The gene product may also be involved in lymphopoiesis, therefore, it can be used in immune disorders such as infection, inflammation, allergy, immunodeficiency etc. In addition, this gene product may have commercial utility in the expansion of stem cells and committed progenitors of various blood lineages, and in the differentiation and/or proliferation of various cell types. Protein, as well as, antibodies directed against the protein may show utility as a tumor marker and/or immunotherapy targets for the above listed tissues.

[0152] Many polynucleotide sequences, such as EST sequences, are publicly available and accessible through sequence databases. Some of these sequences are related to SEQ ID NO:55 and may have been publicly available prior to conception of the present invention. Preferably, such related polynucleotides are specifically excluded from the scope of the present invention. To list every related sequence is cumbersome. Accordingly, preferably excluded from the present invention are one or more polynucleotides comprising a nucleotide sequence described by the general formula of a-b, where a is any integer between 1 to 1469 of SEQ ID NO:55, b is an integer of 15 to 1483, where both a and b correspond to the positions of nucleotide residues shown in SEQ ID NO:55, and where b is greater than or equal to a+14.

Features of Protein Encoded by Gene No: 46

[0153] In specific embodiments, polypeptides of the invention comprise the following amino acid sequence:

(SEQ ID NO:500)

KLPRERCGRMKWRQHEFLSPCHMFSFPXLXSKRVRYIFCNSDNFLPLCR.

Polynucleotides encoding these polypeptides are also encompassed by the invention.

[0154] This gene is expressed primarily in activated monocytes. Therefore, polynucleotides and polypeptides of the invention are useful as reagents for differential identification of the tissue(s) or cell type(s) present in a biological sample and for diagnosis of diseases and conditions which include, but are not limited to, immune or hematopoietic disorders including leukemia and allergies. Similarly, polypeptides and antibodies directed to these polypeptides are useful in providing immunological probes for differential identification of the tissue(s) or cell type(s). For a number of disorders of the above tissues or cells, particularly of the lymphoid system, expression of this gene at significantly higher or lower levels may be routinely detected in certain tissues or cell types (e.g., immune, hematopoietic, and cancerous and wounded tissues) or bodily fluids (e.g., lymph, serum, plasma, urine, synovial fluid and spinal fluid) or another tissue or cell sample taken from an individual having such a disorder, relative to the standard gene expression level, i.e., the expression level in healthy tissue or bodily fluid from an individual not having the disorder. Preferred epitopes include those comprising a sequence shown in SEQ ID NO. 161 as residues: Met-1 to Gly-7. The tissue distribution in monocytes indicates that the protein product of this gene is particularly useful for the treatment in tissue repair and modeling since monocytes engage in the synthesis and secretion of many cytokines which are soluble proteins that regulate highly diverse aspects of cellular biology. Monocytes are also important in the fact that their expression of Major Histocompatibility Factor II (MHCII) enable them to select and stimulate the appropriate lymphocytes to combat specific antigens in the blood. Since the gene is expressed in cells of lymphoid origin, the natural gene product may be involved in immune functions. Therefore it may be also used as an agent for immunological disorders including arthritis, asthma, immune deficiency diseases such as AIDS, and leukemia. Protein, as well as, antibodies directed against the protein may show utility as a tumor marker and/or immunotherapy targets for the above listed tissues.

[0155] Many polynucleotide sequences, such as EST sequences, are publicly available and accessible through sequence databases. Some of these sequences are related to SEQ ID NO:56 and may have been publicly available prior to conception of the present invention. Preferably, such related polynucleotides are specifically excluded from the scope of the present invention. To list every related sequence is cumbersome. Accordingly, preferably excluded from the present invention are one or more polynucleotides comprising a nucleotide sequence described by the general formula of a-b, where a is any integer between 1 to 1109 of SEQ ID NO:56, b is an integer of 15 to 1123, where both a and b correspond to the positions of nucleotide residues shown in SEQ ID NO:56, and where b is greater than or equal to a+14.

Features of Protein Encoded by Gene No: 47

[0156] The translation product of this gene has homology to the Na+/H+-exchanging protein: Na+/H+ antiporter in Methanobacterium thermoautotrophicum, as well as, the Na+/H+ antiporter cdu2′ in Clostridium difficile (See Genbank Accession Nos. gi|2621849 (AE000854) and pir|JC53431|JC5343, respectively). Thus, it is likely that this gene has similar Na+/H+ antiporter activity.

[0157] In specific embodiments, polypeptides of the invention comprise the following amino acid sequence:

(SEQ ID NO:501)

NLKEKIFISFAWLPKATVQAAIG,

(SEQ ID NO:502)

WLPKATVQAAIGSVALD,

(SEQ ID NO:503)

VLIRILTTFLMVCFAGFNLKEKIFISFAWLPKATVQAAIGSVALDTARXH
GEKQLEDYG,

(SEQ ID NO:504)

FLMVCFAGFNLKEKIFISFAWLPKATVQAAIGSV,

(SEQ ID NO:505)

LKRKDIYFFCMASKGHSSGCNRICGFGHSKVTWRETIRRLWNGCVDSGIF
VHPHHSPNWKSAYWFTGPQASAES,

(SEQ ID NO:506)

GHSSGCNRICGFGHSKVTWRETLRRL

(SEQ ID NO:507)

TAFLALALSMWVVMIYITNLNLSAFFFKHPFIIHLNLHKDISTLMYYHSL
QLMWERPASVSSSARIALTFNFHSFLIHICPGSDALNWFWLSFLDLFLLL
NIIMQSLINFYHHLP,

(SEQ ID NO:508)

LSAFFFKHPFIIHLNLHKDISTLM,
and/or

(SEQ ID NO:509)

HICPGSDALNWFWLSFLDLFLLLN.

[0158] This gene is expressed primarily in osteoclastoma cells. Therefore, polynucleotides and polypeptides of the invention are useful as reagents for differential identification of the tissue(s) or cell type(s) present in a biological sample and for diagnosis of diseases and conditions which include, but are not limited to, immune, hematopoietic, or skeletal disorders, particularly, osteoporosis or leukemia. Similarly, polypeptides and antibodies directed to these polypeptides are useful in providing immunological probes for differential identification of the tissue(s) or cell type(s). For a number of disorders of the above tissues or cells, particularly of the lymphoid system, expression of this gene at significantly higher or lower levels may be routinely detected in certain tissues or cell types (e.g., immune, hematopoietic, skeletal, and cancerous and wounded tissues) or bodily fluids (e.g., lymph, serum, plasma, urine, synovial fluid and spinal fluid) or another tissue or cell sample taken from an individual having such a disorder, relative to the standard gene expression level, i.e., the expression level in healthy tissue or bodily fluid from an individual not having the disorder. Preferred epitopes include those comprising a sequence shown in SEQ ID NO. 162 as residues: His-35 to Gln-43. The tissue distribution predominantly in osteoclastoma cells (the site of hematopoieisis) indicates that polynucleotides and polypeptides corresponding to this gene are useful for the diagnosis and treatment of bone related diseases including osteoporosis, osteopetrosis and leukemia. Furthermore, its homology to known transporter proteins may suggest the protein is useful in the diagnosis, treatment, and prevention of various developmental and metabolic disorders, particularly those based upon ion and proton transport. Protein, as well as, antibodies directed against the protein may show utility as a tumor marker and/or immunotherapy targets for the above listed tissues.

[0159] Many polynucleotide sequences, such as EST sequences, are publicly available and accessible through sequence databases. Some of these sequences are related to SEQ ID NO:57 and may have been publicly available prior to conception of the present invention. Preferably, such related polynucleotides are specifically excluded from the scope of the present invention. To list every related sequence is cumbersome. Accordingly, preferably excluded from the present invention are one or more polynucleotides comprising a nucleotide sequence described by the general formula of a-b, where a is any integer between 1 to 1225 of SEQ ID NO:57, b is an integer of 15 to 1239, where both a and b correspond to the positions of nucleotide residues shown in SEQ ID NO:57, and where b is greater than or equal to a+14.

Features of Protein Encoded by Gene No: 48

[0160] In specific embodiments, polypeptides of the invention comprise the following amino acid sequence:

(SEQ ID NO:510)

RAGGQGACTHAKGSETPPPASPQTSEPAPSPLPPHLTGGPGMYSSEAKLP
NSFSCLGLAGTGAGI,

(SEQ ID NO:511)

GSETPPPASPQTSEPAPSPLPPHLTGGP,

(SEQ ID NO:512)

PVAAGCLPHQPLKGWGAGGMHPCKRLRNSPSGKPSDFGACAFPPTASPHR
RARHVFLRGETAKLFLLSWVGWHWGGHLGYSLCSWHWASSSSTCVHPQLG
QPSALRWGPKHLPFRLASLGLG,
and/or

(SEQ ID NO:513)

LRNSPSGKPSDFGACAFPPTASPHRRARHVFLR.

[0161] This gene is expressed primarily in amygdala and to a lesser extent in amniotic cells. Therefore, polynucleotides and polypeptides of the invention are useful as reagents for differential identification of the tissue(s) or cell type(s) present in a biological sample and for diagnosis of diseases and conditions which include, but are not limited to, neural, reproductive, or developmental disorders, particularly depression and other emotional behavioral problems. Similarly, polypeptides and antibodies directed to these polypeptides are useful in providing immunological probes for differential identification of the tissue(s) or cell type(s). For a number of disorders of the above tissues or cells, particularly of the nervous system, expression of this gene at significantly higher or lower levels may be routinely detected in certain tissues or cell types (e.g., neural, reproductive, developmental, endocrine, cancerous and wounded tissues) or bodily fluids (e.g., lymph, amniotic fluid, serum, plasma, urine, synovial fluid and spinal fluid) or another tissue or cell sample taken from an individual having such a disorder, relative to the standard gene expression level, i.e., the expression level in healthy tissue or bodily fluid from an individual not having the disorder. Preferred epitopes include those comprising a sequence shown in SEQ ID NO. 163 as residues: Pro-74 to Gly-83, Pro-88 to Thr-95. The tissue distribution in amygdala indicates that polynucleotides and polypeptides corresponding to this gene are useful for the diagnosis and treatment of mental problems associated with emotional behavior and neurodegenerative states such as Alzheimers Disease, Parkinsons Disease, Huntingtons Disease, schizophrenia, mania, dementia, paranoia, obsessive compulsive disorder and panic disorders, and depression. The amygdala processes sensory information and relays this to other areas of the brain including the endocrine and autonomic domains of the hypothalamus and the brain stem. The protein may also be useful in the diagnosis, treatment, and/or prevention of a variety of developmental disorders or even in the amelioration of immune or endocrine conditions since the efficacy of the immune system has been shown to be indirectly related to an individual's emotional condition. Protein, as well as, antibodies directed against the protein may show utility as a tumor marker and/or immunotherapy targets for the above listed tissues.

[0162] Many polynucleotide sequences, such as EST sequences, are publicly available and accessible through sequence databases. Some of these sequences are related to SEQ ID NO:58 and may have been publicly available prior to conception of the present invention. Preferably, such related polynucleotides are specifically excluded from the scope of the present invention. To list every related sequence is cumbersome. Accordingly, preferably excluded from the present invention are one or more polynucleotides comprising a nucleotide sequence described by the general formula of a-b, where a is any integer between 1 to 789 of SEQ ID NO:58, b is an integer of 15 to 803, where both a and b correspond to the positions of nucleotide residues shown in SEQ ID NO:58, and where b is greater than or equal to a+14.

Features of Protein Encoded by Gene No: 49

[0163] This gene is expressed primarily in stromal cells. Therefore, polynucleotides and polypeptides of the invention are useful as reagents for differential identification of the tissue(s) or cell type(s) present in a biological sample and for diagnosis of diseases and conditions which include, but are not limited to, immune or hematopoietic disorders, particularly leukemia and other cancers and disorders deriving from hematopoietic cells. Similarly, polypeptides and antibodies directed to these polypeptides are useful in providing immunological probes for differential identification of the tissue(s) or cell type(s). For a number of disorders of the above tissues or cells, particularly of the lymphoid system, expression of this gene at significantly higher or lower levels may be routinely detected in certain tissues or cell types (e.g., immune, hematopoietic cancerous and wounded tissues) or bodily fluids (e.g., lymph, serum, plasma, urine, synovial fluid and spinal fluid) or another tissue or cell sample taken from an individual having such a disorder, relative to the standard gene expression level, i.e., the expression level in healthy tissue or bodily fluid from an individual not having the disorder. The tissue distribution in stromal cells indicates that polynucleotides and polypeptides corresponding to this gene are useful for the treatment and diagnosis of hematopoetic related disorders such as anemia, pancytopenia, leukopenia, thrombocytopenia or leukemia since stromal cells are important in the production of cells of hematopoietic lineages. The uses include bone marrow cell ex vivo culture, bone marrow transplantation, bone marrow reconstitution, radiotherapy or chemotherapy of neoplasia. The gene product may also be involved in lymphopoiesis, therefore, it can be used in immune disorders such as infection, inflammation, allergy, immunodeficiency etc. Protein, as well as, antibodies directed against the protein may show utility as a tumor marker and/or immunotherapy targets for the above listed tissues.

[0164] Many polynucleotide sequences, such as EST sequences, are publicly available and accessible through sequence databases. Some of these sequences are related to SEQ ID NO:59 and may have been publicly available prior to conception of the present invention. Preferably, such related polynucleotides are specifically excluded from the scope of the present invention. To list every related sequence is cumbersome. Accordingly, preferably excluded from the present invention are one or more polynucleotides comprising a nucleotide sequence described by the general formula of a-b, where a is any integer between 1 to 981 of SEQ ID NO:59, b is an integer of 15 to 995, where both a and b correspond to the positions of nucleotide residues shown in SEQ ID NO:59, and where b is greater than or equal to a+14.

Features of Protein Encoded by Gene No: 50

[0165] In specific embodiments, polypeptides of the invention comprise the following amino acid sequence: FFTWRTYLPLD (SEQ ID NO:514). Polynucleotides encoding these polypeptides are also encompassed by the invention. The gene encoding the disclosed cDNA is believed to reside on chromosome 9. Accordingly, polynucleotides related to this invention are useful as a marker in linkage analysis for chromosome 9. This gene is expressed primarily in tumors, particularly skin and adrenal gland tumors, and to a lesser extent in bone marrow stromal cells and activated T cells. Therefore, polynucleotides and polypeptides of the invention are useful as reagents for differential identification of the tissue(s) or cell type(s) present in a biological sample and for diagnosis of diseases and conditions which include, but are not limited to, cancer, hematopoietic or immune disorders. Similarly, polypeptides and antibodies directed to these polypeptides are useful in providing immunological probes for differential identification of the tissue(s) or cell type(s). For a number of disorders of the above tissues or cells, particularly of the skin, adrenal gland, and immune system, expression of this gene at significantly higher or lower levels may be routinely detected in certain tissues or cell types (e.g., hematopoietic, immune, endocrine, integumentary, and cancerous and wounded tissues) or bodily fluids (e.g., lymph, serum, plasma, urine, synovial fluid and spinal fluid) or another tissue or cell sample taken from an individual having such a disorder, relative to the standard gene expression level, i.e., the expression level in healthy tissue or bodily fluid from an individual not having the disorder. Preferred epitopes include those comprising a sequence shown in SEQ ID NO. 165 as residues: Glu-13 to Arg-22, Ser-58 to Trp-63. The tissue distribution in tumors indicates that polynucleotides and polypeptides corresponding to this gene are useful for the detection and treatment of cancer. Elevated levels of expression of this gene in a variety of tumors suggest that it may play a role in cell proliferation, the induction of angiogenesis, destruction of the basal lamina, or a variety of other physiological processes that support the growth and development of tumors and cancer. Alternatively, its expression in the hematopoietic compartment, particularly in the bone marrow stroma and by activated T cells suggests that it may represent a soluble factor capable of influencing a variety of hematopoietic lineages. Therefore, this gene product may have commercial utility in the expansion of stem cells and committed progenitors of various blood lineages, and in the differentiation and/or proliferation of blood cells. Protein, as well as, antibodies directed against the protein may show utility as a tumor marker and/or immunotherapy targets for the above listed tissues.

[0166] Many polynucleotide sequences, such as EST sequences, are publicly available and accessible through sequence databases. Some of these sequences are related to SEQ ID NO:60 and may have been publicly available prior to conception of the present invention. Preferably, such related polynucleotides are specifically excluded from the scope of the present invention. To list every related sequence is cumbersome. Accordingly, preferably excluded from the present invention are one or more polynucleotides comprising a nucleotide sequence described by the general formula of a-b, where a is any integer between 1 to 952 of SEQ ID NO:60, b is an integer of 15 to 966, where both a and b correspond to the positions of nucleotide residues shown in SEQ ID NO:60, and where b is greater than or equal to a+14.

[0167] Features of Protein Encoded by Gene No: 51

(SEQ ID NO:515)

LQVYIQMHR,

(SEQ ID NO:516)

KFIQNKDCQRMLNLGRGRFDGGTELSNKVSKFLLTNYPLIAKGKTITIHW
RNWTSYPSDQN,
and/or

(SEQ ID NO:517)

RGRFDGGTELSNKVSKFLLTNYPLIAKG.

invention.

[0168] This gene is expressed primarily in benign human breast tissue. Therefore, polynucleotides and polypeptides of the invention are useful as reagents for differential identification of the tissue(s) or cell type(s) present in a biological sample and for diagnosis of diseases and conditions which include, but are not limited to, reproductive, proliferative, or endocrine disorders, particularly breast cancer. Similarly, polypeptides and antibodies directed to these polypeptides are useful in providing immunological probes for differential identification of the tissue(s) or cell type(s). For a number of disorders of the above tissues or cells, particularly of the breast and reproductive tissues, expression of this gene at significantly higher or lower levels may be routinely detected in certain tissues or cell types (e.g., reproductive, proliferative, endocrine, and cancerous and wounded tissues) or bodily fluids (e.g., lymph, serum, breast milk, plasma, urine, synovial fluid and spinal fluid) or another tissue or cell sample taken from an individual having such a disorder, relative to the standard gene expression level, i.e., the expression level in healthy tissue or bodily fluid from an individual not having the disorder. The tissue distribution in benign human breast tissue indicates that polynucleotides and polypeptides corresponding to this gene are useful for the treatment and/or diagnosis of breast cancer. Alternately, this protein may play an important role in lactation or represent a critical component secreted into the milk, which may have an important function in the immunoprotection, health, and/or nourishment of the infant upon breastfeeding. Protein, as well as, antibodies directed against the protein may show utility as a tumor marker and/or immunotherapy targets for the above listed tumors and tissues

[0169] Many polynucleotide sequences, such as EST sequences, are publicly available and accessible through sequence databases. Some of these sequences are related to SEQ ID NO:61 and may have been publicly available prior to conception of the present invention. Preferably, such related polynucleotides are specifically excluded from the scope of the present invention. To list every related sequence is cumbersome. Accordingly, preferably excluded from the present invention are one or more polynucleotides comprising a nucleotide sequence described by the general formula of a-b, where a is any integer between 1 to 248 of SEQ ID NO:61, b is an integer of 15 to 262, where both a and b correspond to the positions of nucleotide residues shown in SEQ ID NO:61, and where b is greater than or equal to a+14.

Features of Protein Encoded by Gene No: 52

[0170] The translation product of this gene has homology with the conserved human ring finger proteins (See Genbank Accession No. gnl|PID|e351238 (AJ001019)), which are thought to be important in facilitating and regulating signal transduction pathways in eukaryotic cells.

(SEQ ID NO:518)

HDRTMQDIVYKLVPGLQE,

(SEQ ID NO:519)

FASHDRTMQDIVYKLVPGLQEGE,

(SEQ ID NO:520)

GTGSFASHDRT,

(SEQ ID NO:521)

PRSRPALRPGRQRPPSHSATSGVLRPRKKPDP,

(SEQ ID NO:522)

SLRSQPGLCSPCSPGSLVLGWEAPFLLAESPSSHPCSQPNFISLAGLFFR
LRCVXIFLPLMCIHSASMDRMFSTWXPQGSTQLLPLPGPCLXPGPHLLSQ
ACLPSSHSASFPTTEEQHVGIAGSWCF,
and/or

(SEQ ID NO:523)

CSPCSPGSLVLGWEAPFLLAESPSSHPCSQPNFISLA.

[0171] This gene is expressed primarily in adult whole brain. Therefore, polynucleotides and polypeptides of the invention are useful as reagents for differential identification of the tissue(s) or cell type(s) present in a biological sample and for diagnosis of diseases and conditions which include, but are not limited to, neural disorders, particularly neurodegenerative disorders; Schizophrenia; Alzheimers; tumors of a brain or neuronal cell origin. Similarly, polypeptides and antibodies directed to these polypeptides are useful in providing immunological probes for differential identification of the tissue(s) or cell type(s). For a number of disorders of the above tissues or cells, particularly of the CNS and/or peripheral nervous system, expression of this gene at significantly higher or lower levels may be routinely detected in certain tissues or cell types (e.g., neural, and cancerous and wounded tissues) or bodily fluids (e.g., lymph, serum, plasma, urine, synovial fluid and spinal fluid) or another tissue or cell sample taken from an individual having such a disorder, relative to the standard gene expression level, i.e., the expression level in healthy tissue or bodily fluid from an individual not having the disorder. Preferred epitopes include those comprising a sequence shown in SEQ ID NO. 167 as residues: Phe-39 to Gly-44. The tissue distribution in adult whole brain indicates that polynucleotides and polypeptides corresponding to this gene are useful for the detection/treatment of neurodegenerative disease states and behavioral disorders such as Alzheimers Disease, Parkinsons Disease, Huntingtons Disease, schizophrenia, mania, dementia, paranoia, obsessive compulsive disorder and panic disorder. In addition, considering the homology to the conserved ring finger proteins may suggest that the gene or gene product may also play a role in the treatment and/or detection of developmental disorders associated with the developing embryo. Protein, as well as, antibodies directed against the protein may show utility as a tumor marker and/or immunotherapy targets for the above listed tissues.

[0172] Many polynucleotide sequences, such as EST sequences, are publicly available and accessible through sequence databases. Some of these sequences are related to SEQ ID NO:62 and may have been publicly available prior to conception of the present invention. Preferably, such related polynucleotides are specifically excluded from the scope of the present invention. To list every related sequence is cumbersome. Accordingly, preferably excluded from the present invention are one or more polynucleotides comprising a nucleotide sequence described by the general formula of a-b, where a is any integer between 1 to 739 of SEQ ID NO:62, b is an integer of 15 to 753, where both a and b correspond to the positions of nucleotide residues shown in SEQ ID NO:62, and where b is greater than or equal to a+14.

Features of Protein Encoded by Gene No: 53

[0173] The translation product of this gene shares homology with the human conserved Lst-1 gene product, a member of the TNF family of proteins (See Genbank Accession No. gi|1127546).

(SEQ ID NO:524)

LVLSLGAWGWPSTCLWW,

(SEQ ID NO:525)

GWQNAYRD,

(SEQ ID NO:526)

LHLKHWPSLXKLQEAVGKVIINATTCTVTCGLGYKEETVCEVGPDGVRRK
CQTRRLECLTNWICGMLHFTILIGKEFELSCLSSDILEFGQEAFRFTXXL
ARGVISTDDEVFKPFQANSHFVKFKYAQEYDSGTYRCDVQLVKNLRLVKR
LYFGLRVLPPNLVNLNFHQSLTEDQD,

(SEQ ID NO:527)

ANSHFVKFKYAQEYDSGTYRCDVQLVKNLRLVKRLYFGLRVLPPNLV,

(SEQ ID NO:528)

LMEIQIHQVRRKDPQPKIEPLDESQVFYQLHITAICPRVILLSIFKLHKV
GVGLKGFEDLIVSGDDTSSKXXGEPESFLSKLQDV,
and/or

(SEQ ID NO:529)

LDESQVFYQLHITAICPRVILLSIFKL.

encompassed by the invention.

[0174] This gene is expressed primarily in human 6-week old embryo. Therefore, polynucleotides and polypeptides of the invention are useful as reagents for differential identification of the tissue(s) or cell type(s) present in a biological sample and for diagnosis of diseases and conditions which include, but are not limited to, developmental disorders, particularly abnormal cell proliferation; defects in terminal tissue differentiation. Similarly, polypeptides and antibodies directed to these polypeptides are useful in providing immunological probes for differential identification of the tissue(s) or cell type(s). For a number of disorders of the above tissues or cells, particularly of the embryo, expression of this gene at significantly higher or lower levels may be routinely detected in certain tissues or cell types (e.g., developmental, and cancerous and wounded tissues) or bodily fluids (e.g., lymph, amniotic fluid, serum, plasma, urine, synovial fluid and spinal fluid) or another tissue or cell sample taken from an individual having such a disorder, relative to the standard gene expression level, i.e., the expression level in healthy tissue or bodily fluid from an individual not having the disorder. The tissue distribution in embryonic tissues indicates that polynucleotides and polypeptides corresponding to this gene are useful for the treatment and/or diagnosis of fetal disorders. Alternately, the expression may reflect a role for this protein in proliferating cells. In such an event, this gene product may be useful in the treatment or diagnosis of abnormal cell proliferation, such as that involved in cancer. Similarly, embryonic development also involves decisions involving cell differentiation and/or apoptosis involved in pattern formation. Thus, this protein may also be involved in apoptosis or tissue differentiation, and could again be useful in cancer therapy. Protein, as well as, antibodies directed against the protein may show utility as a tumor marker and/or immunotherapy targets for the above listed tissues.

[0175] Many polynucleotide sequences, such as EST sequences, are publicly available and accessible through sequence databases. Some of these sequences are related to SEQ ID NO:63 and may have been publicly available prior to conception of the present invention. Preferably, such related polynucleotides are specifically excluded from the scope of the present invention. To list every related sequence is cumbersome. Accordingly, preferably excluded from the present invention are one or more polynucleotides comprising a nucleotide sequence described by the general formula of a-b, where a is any integer between 1 to 725 of SEQ ID NO:63, b is an integer of 15 to 739, where both a and b correspond to the positions of nucleotide residues shown in SEQ ID NO:63, and where b is greater than or equal to a+14.

Features of Protein Encoded by Gene No: 54

[0176] This gene is expressed primarily in human epithelioid sarcoma. Therefore, polynucleotides and polypeptides of the invention are useful as reagents for differential identification of the tissue(s) or cell type(s) present in a biological sample and for diagnosis of diseases and conditions which include, but are not limited to, integumentary disorders, particularly epithelial sarcoma; tumors of an epithelial cell origin including the underlying integument. Similarly, polypeptides and antibodies directed to these polypeptides are useful in providing immunological probes for differential identification of the tissue(s) or cell type(s). For a number of disorders of the above tissues or cells, particularly of the skin and epithelial tissue layers, expression of this gene at significantly higher or lower levels may be routinely detected in certain tissues or cell types (e.g., integumenary, and cancerous and wounded tissues) or bodily fluids (e.g., lymph, serum, plasma, urine, synovial fluid and spinal fluid) or another tissue or cell sample taken from an individual having such a disorder, relative to the standard gene expression level, i.e., the expression level in healthy tissue or bodily fluid from an individual not having the disorder. Preferred epitopes include those comprising a sequence shown in SEQ ID NO. 169 as residues: Met-1 to Tyr-6, Thr-24 to Cys-36. The tissue distribution in epithelioid sarcoma tissue indicates that polynucleotides and polypeptides corresponding to this gene are useful for the treatment and/or diagnosis of epithelial cancer. This gene product displays enhanced expression in epithelial cell sarcoma, and thus may be involved in cell proliferation, apoptosis, or in the control of angiogenesis. Similarly, expression within epithelial tissues indicates the protein product of this gene is useful for the treatment, diagnosis, and/or prevention of various skin disorders including congenital disorders (i.e. nevi, moles, freckles, Mongolian spots, hemangiomas, port-wine syndrome), integumentary tumors (i.e. keratoses, Bowen's disease, basal cell carcinoma, squamous cell carcinoma, malignant melanoma, Paget's disease, mycosis fungoides, and Kaposi's sarcoma), injuries and inflammation of the skin (i.e. wounds, rashes, prickly heat disorder, psoriasis, dermatitis), atherosclerosis, uticaria, eczema, photosensitivity, autoimmune disorders (i.e. lupus erythematosus, vitiligo, dermatomyositis, morphea, scleroderma, pemphigoid, and pemphigus), keloids, striae, erythema, petechiae, purpura, and xanthelasma. In addition, such disorders may predispose increased susceptibility to viral and bacterial infections of the skin (i.e. cold sores, warts, chickenpox, molluscum contagiosum, herpes zoster, boils, cellulitis, erysipelas, impetigo, tinea, althletes foot, and ringworm). Moreover, the protein product of this gene may also be useful for the treatment or diagnosis of various connective tissue disorders such as arthritis, trauma, tendonitis, chrondomalacia and inflammation, autoimmune disorders such as rheumatoid arthritis, lupus, scleroderma, and dermatomyositis as well as dwarfism, spinal deformation, and specific joint abnormalities as well as chondrodysplasias (i.e. spondyloepiphyseal dysplasia congenita, familial osteoarthritis, Atelosteogenesis type II, metaphyseal chondrodysplasia type Schmid). Protein, as well as, antibodies directed against the protein may show utility as a tumor marker and/or immunotherapy targets for the above listed tissues.

[0177] Many polynucleotide sequences, such as EST sequences, are publicly available and accessible through sequence databases. Some of these sequences are related to SEQ ID NO:64 and may have been publicly available prior to conception of the present invention. Preferably, such related polynucleotides are specifically excluded from the scope of the present invention. To list every related sequence is cumbersome. Accordingly, preferably excluded from the present invention are one or more polynucleotides comprising a nucleotide sequence described by the general formula of a-b, where a is any integer between 1 to 462 of SEQ ID NO:64, b is an integer of 15 to 476, where both a and b correspond to the positions of nucleotide residues shown in SEQ ID NO:64, and where b is greater than or equal to a+14.

Features of Protein Encoded by Gene No: 55

[0178] In specific embodiments, polypeptides of the invention comprise the following amino acid sequence: NSARED (SEQ ID NO:530). Polynucleotides encoding these polypeptides are also encompassed by the invention. This gene is expressed primarily in endometrial tumors. Therefore, polynucleotides and polypeptides of the invention are useful as reagents for differential identification of the tissue(s) or cell type(s) present in a biological sample and for diagnosis of diseases and conditions which include, but are not limited to, endometrial cancer including other cancers of the female reproductive system. Similarly, polypeptides and antibodies directed to these polypeptides are useful in providing immunological probes for differential identification of the tissue(s) or cell type(s). For a number of disorders of the above tissues or cells, particularly of the endometrium and reproductive system, expression of this gene at significantly higher or lower levels may be routinely detected in certain tissues or cell types (e.g., reproductive, cancerous and wounded tissues) or bodily fluids (e.g., lymph, serum, plasma, urine, synovial fluid and spinal fluid) or another tissue or cell sample taken from an individual having such a disorder, relative to the standard gene expression level, i.e., the expression level in healthy tissue or bodily fluid from an individual not having the disorder. The tissue distribution indicates that polynucleotides and polypeptides corresponding to this gene are useful for the diagnosis and treatment of cancers, particularly those of the endometrium and other reproductive organs. Protein, as well as, antibodies directed against the protein may show utility as a tumor marker and/or immunotherapy targets for the above listed tumors and tissues

[0179] Many polynucleotide sequences, such as EST sequences, are publicly available and accessible through sequence databases. Some of these sequences are related to SEQ ID NO:65 and may have been publicly available prior to conception of the present invention. Preferably, such related polynucleotides are specifically excluded from the scope of the present invention. To list every related sequence is cumbersome. Accordingly, preferably excluded from the present invention are one or more polynucleotides comprising a nucleotide sequence described by the general formula of a-b, where a is any integer between 1 to 682 of SEQ ID NO:65, b is an integer of 15 to 696, where both a and b correspond to the positions of nucleotide residues shown in SEQ ID NO:65, and where b is greater than or equal to a+14.

Features of Protein Encoded by Gene No: 56

[0180] This gene is expressed primarily in metastatic melanoma, and to a lesser extent, in fetal lung. Therefore, polynucleotides and polypeptides of the invention are useful as reagents for differential identification of the tissue(s) or cell type(s) present in a biological sample and for diagnosis of diseases and conditions which include, but are not limited to, integumentary, developmental, or pulmonary disorders, particularly melanoma, ARDS, emphysema, or cystic fibrosis. Similarly, polypeptides and antibodies directed to these polypeptides are useful in providing immunological probes for differential identification of the tissue(s) or cell type(s). For a number of disorders of the above tissues or cells, particularly of the skin, expression of this gene at significantly higher or lower levels may be routinely detected in certain tissues or cell types (e.g., developmental, integumentary, pulmonary, and cancerous and wounded tissues) or bodily fluids (e.g., lymph, serum, pulmonary sputum or surfactant, amniotic fluid, plasma, urine, synovial fluid and spinal fluid) or another tissue or cell sample taken from an individual having such a disorder, relative to the standard gene expression level, i.e., the expression level in healthy tissue or bodily fluid from an individual not having the disorder. Preferred epitopes include those comprising a sequence shown in SEQ ID NO. 171 as residues: Asp-20 to Lys-25. The tissue distribution in metastatic melanoma indicates that polynucleotides and polypeptides corresponding to this gene are useful for the diagnosis and treatment of cancer, particularly melanoma, and more particularly, metastasizing melanomas. In addition, the tissue distribution also indicates that polynucleotides and polypeptides corresponding to this gene are useful for the diagnosis and treatment of cancer and other proliferative disorders. Expression in embryonic tissue and other cellular sources marked by proliferating cells indicates that this protein may play a role in the regulation of cellular division. Moreover, the protein product of this gene is useful for the treatment, diagnosis, and/or prevention of various skin disorders including congenital disorders (i.e. nevi, moles, freckles, Mongolian spots, hemangiomas, port-wine syndrome), integumentary tumors (i.e. keratoses, Bowen's disease, basal cell carcinoma, squamous cell carcinoma, malignant melanoma, Paget's disease, mycosis fungoides, and Kaposi's sarcoma), injuries and inflammation of the skin (i.e. wounds, rashes, prickly heat disorder, psoriasis, dermatitis), atherosclerosis, uticaria, eczema, photosensitivity, autoimmune disorders (i.e. lupus erythematosus, vitiligo, dermatomyositis, morphea, scleroderma, pemphigoid, and pemphigus), keloids, striae, erythema, petechiae, purpura, and xanthelasma. In addition, such disorders may predispose increased susceptibility to viral and bacterial infections of the skin (i.e. cold sores, warts, chickenpox, molluscum contagiosum, herpes zoster, boils, cellulitis, erysipelas, impetigo, tinea, althletes foot, and ringworm). Moreover, the protein product of this gene may also be useful for the treatment or diagnosis of various connective tissue disorders such as arthritis, trauma, tendonitis, chrondomalacia and inflammation, autoimmune disorders such as rheumatoid arthritis, lupus, scleroderma, and dermatomyositis as well as dwarfism, spinal deformation, and specific joint abnormalities as well as chondrodysplasias (i.e. spondyloepiphyseal dysplasia congenita, familial osteoarthritis, Atelosteogenesis type II, metaphyseal chondrodysplasia type Schmid). Protein, as well as, antibodies directed against the protein may show utility as a tumor marker and/or immunotherapy targets for the above listed tissues.

[0181] Many polynucleotide sequences, such as EST sequences, are publicly available and accessible through sequence databases. Some of these sequences are related to SEQ ID NO:66 and may have been publicly available prior to conception of the present invention. Preferably, such related polynucleotides are specifically excluded from the scope of the present invention. To list every related sequence is cumbersome. Accordingly, preferably excluded from the present invention are one or more polynucleotides comprising a nucleotide sequence described by the general formula of a-b, where a is any integer between 1 to 1876 of SEQ ID NO:66, b is an integer of 15 to 1890, where both a and b correspond to the positions of nucleotide residues shown in SEQ ID NO:66, and where b is greater than or equal to a+14.

Features of Protein Encoded by Gene No: 57

[0182] In specific embodiments, polypeptides of the invention comprise the following amino acid sequence:

| | |
|---|---|
| EGTGTRFGLACSLPASHALLRPGSESRLLPVMPPIQEPRFFSKTRPVPFSTAASQQRAPGSPRSQLWLWTTWLRPLGLQSLHWVYLGL | (SEQ ID NO:531) |
| IHSWSQGWGFTCEHQTDLLASRAVDSLMKALVRRKHSVLRLLCNRFVI, | |
| PPIQEPRFFSKTRPVPFSTAASQQRAPGSP, | (SEQ ID NO:532) |
| TCEHQ TDLLASRAVDSLMKALVRR, | (SEQ ID NO:533) |
| QCKLCNPRGRSHVVQSHSWDLGDPGALCWEAAVEKGTGRVLLKNRGSCMGGITGRRRLSLPGLSRAWLAGRLHASPNRVPVPSHRA | (SEQ ID NO:534) |
| DGSCGSHGEGEXLGALLRSRXL, | |
| and/or | |
| MGGITGRRRLSLPGLSRAWLAGRLHASPNRVP. | (SEQ ID NO:535) |

Polynucleotides encoding these polypeptides are also encompassed by the invention.

[0183] This gene is expressed primarily in T-cell lymphoma. Therefore, polynucleotides and polypeptides of the invention are useful as reagents for differential identification of the tissue(s) or cell type(s) present in a biological sample and for diagnosis of diseases and conditions which include, but are not limited to, immune or hematopoietic disorders, particularly lymphomas and other immune-derived cancers. Similarly, polypeptides and antibodies directed to these polypeptides are useful in providing immunological probes for differential identification of the tissue(s) or cell type(s). For a number of disorders of the above tissues or cells, particularly of the immune system, expression of this gene at significantly higher or lower levels may be routinely detected in certain tissues or cell types (e.g., immune, hematopoietic, and cancerous and wounded tissues) or bodily fluids (e.g., lymph, serum, plasma, urine, synovial fluid and spinal fluid) or another tissue or cell sample taken from an individual having such a disorder, relative to the standard gene expression level, i.e., the expression level in healthy tissue or bodily fluid from an individual not having the disorder. Preferred epitopes include those comprising a sequence shown in SEQ ID NO. 172 as residues: Met-1 to Asn-7. The tissue distribution in T-cell lymphoma indicates that polynucleotides and polypeptides corresponding to this gene are useful for the diagnosis and treatment of lymphomas, particularly T cell lymphomas, and other cancers. In addition, the tissue distribution indicates that polynucleotides and polypeptides corresponding to this gene are useful for the diagnosis and treatment of cancer and other proliferative disorders. Moreover, the expression in hematopoietic cells and tissues indicates that this protein may play a role in the proliferation, differentiation, and/or survival of hematopoietic cell lineages. Thus, this gene may be useful in the treatment of lymphoproliferative disorders, and in the maintenance and differentiation of various hematopoietic lineages from early hematopoietic stem and committed progenitor cells. Protein, as well as, antibodies directed against the protein may show utility as a tumor marker and/or immunotherapy targets for the above listed tissues.

[0184] Many polynucleotide sequences, such as EST sequences, are publicly available and accessible through sequence databases. Some of these sequences are related to SEQ ID NO:67 and may have been publicly available prior to conception of the present invention. Preferably, such related polynucleotides are specifically excluded from the scope of the present invention. To list every related sequence is cumbersome. Accordingly, preferably excluded from the present invention are one or more polynucleotides comprising a nucleotide sequence described by the general formula of a-b, where a is any integer between 1 to 1600 of SEQ ID NO:67, b is an integer of 15 to 1614, where both a and b correspond to the positions of nucleotide residues shown in SEQ ID NO:67, and where b is greater than or equal to a+14.

Features of Protein Encoded by Gene No: 58

[0185] In specific embodiments, polypeptides of the invention comprise the following amino acid sequence: WRYSVFFFSFKQRKK (SEQ ID NO:536). Polynucleotides encoding these polypeptides are also encompassed by the invention. The gene encoding the disclosed cDNA is believed to reside on chromosome 7. Accordingly, polynucleotides related to this invention are useful as a marker in linkage analysis for chromosome 7. This gene is expressed primarily in brain, and to a lesser extent, in spinal cord. Therefore, polynucleotides and polypeptides of the invention are useful as reagents for differential identification of the tissue(s) or cell type(s) present in a biological sample and for diagnosis of diseases and conditions which include, but are not limited to, CNS and peripheral nervous system diseases and disorders, particularly neurodegenerative conditions. Similarly, polypeptides and antibodies directed to these polypeptides are useful in providing immunological probes for differential identification of the tissue(s) or cell type(s). For a number of disorders of the above tissues or cells, particularly of the nervous system, expression of this gene at significantly higher or lower levels may be routinely detected in certain tissues or cell types (e.g., neural, and cancerous and wounded tissues) or bodily fluids (e.g., lymph, serum, plasma, urine, synovial fluid and spinal fluid) or another tissue or cell sample taken from an individual having such a disorder, relative to the standard gene expression level, i.e., the expression level in healthy tissue or bodily fluid from an individual not having the disorder. Preferred epitopes include those comprising a sequence shown in SEQ ID NO. 173 as residues: Tyr-14 to Ala-30. The tissue distribution in brain and spinal cord indicates that polynucleotides and polypeptides corresponding to this gene are useful for the detection/treatment of neurodegenerative disease states and behavioral disorders such as Alzheimers Disease, Parkinsons Disease, Huntingtons Disease, schizophrenia, mania, dementia, paranoia, obsessive compulsive disorder, panic disorder, and autism. Protein, as well as, antibodies directed against the protein may show utility as a tumor marker and/or immunotherapy targets for the above listed tissues.

[0186] Many polynucleotide sequences, such as EST sequences, are publicly available and accessible through sequence databases. Some of these sequences are related to SEQ ID NO:68 and may have been publicly available prior to conception of the present invention. Preferably, such related polynucleotides are specifically excluded from the scope of the present invention. To list every related sequence is cumbersome. Accordingly, preferably excluded from the present invention are one or more polynucleotides comprising a nucleotide sequence described by the general formula of a-b, where a is any integer between 1 to 582 of SEQ ID NO:68, b is an integer of 15 to 596, where both a and b correspond to the positions of nucleotide residues shown in SEQ ID NO:68, and where b is greater than or equal to a+14.

Features of Protein Encoded by Gene No: 59

[0187] The translation product of this gene shares homology to the conserved C. elegans protein FER-1, which, based upon its conservation, may be attributed to playing a vital role in cellular metabolism (See Genbank Accession No. gi|1373333).

| | |
|---|---|
| QGKLQMWVDVFPKSL, | (SEQ ID NO:537) |
| PPFNITPRKAKKYYLR, | (SEQ ID NO:538) |
| KTDVHYRSLDGEGNFNWRF, | (SEQ ID NO:539) |
| PRLIIQIWDNDKFSLDDYLGFLELDL, | (SEQ ID NO:540) |
| PEFPGVFDPSGTLHSTFQPNISQGKLQMWVDVFPKSLGPPGPPFNITPRKAKKYYLRVIIWNTKDVILDEKSITGEEMSDIYVKGW | (SEQ ID NO:541) |
| IPGNEENKQKTDVHYRSLDGEGNFNWRFVFPFDYLPAEQLCIVAKKEHFWSIDQTEFRIPPRLIIQIWDNDKFSLDDYLGFLELDL | |
| RHTIIPAKSPEKCRLDMIPDLKAMNPLKAKTASLFEQKSMKGWWPCYAEKDGARVMAGKVEMTLEILNEKEADERPAGKGRDEPNM | |
| NPKLDLPNRPETSFLWFTNPCKT, | |
| QGKLQMWVDVFPKSLGPPGPPFNITPRK, | (SEQ ID NO:542) |
| VHYRSLDGEGNFNWRFVFPFDYLPAEQLCIVAKK, | (SEQ ID NO:543) |
| FSLDD YLGFLELDLRHTIIPAKSPEKCRLD, | (SEQ ID NO:544) |
| PAGKGRDEPNMNPKLDLPNRPETSFLWF, | (SEQ ID NO:545) |
| AEVHERMVAMLRRERWRPRNGWESGDDIGNPQREGGRREASREGAGRTQHEPQAGLTKSTRNLLPLVHQPMQDHEVHRVAPL, | (SEQ ID NO:546) |
| GDDIGNPQREGGRREASREGAGRTQHEPQA, | (SEQ ID NO:547) |
| ETQVVIQRKLVIVPYLNDQPGWDSKFRLVNTPEMLFFRNDTELFGWKVVKRENKSPVKIPFTIQRSVMDICFLFVFFIARNPAFDV | (SEQ ID NO:548) |
| DVTHFLSCDAFLVQDNVLGVPDDHTQVVFLGFPGCDVERRAWWPQTLGENIHPHLKFSLGNVGLEGAVQSPGRVEHTREFR, | |
| FFRNDTELFGWKVVKRENKSPVKIPFTIQ, | (SEQ ID NO:549) |
| and/or | |
| QVVFLGFPGCDVERRAWWPQTLGENIHPH. | (SEQ ID NO:550) |

[0188] The gene encoding the disclosed cDNA is believed to reside on chromosome 10. Accordingly, polynucleotides related to this invention are useful as a marker in linkage analysis for chromosome 10. This gene is expressed primarily in synovial fibroblasts, and to a lesser extent, in synovial hypoxia. Therefore, polynucleotides and polypeptides of the invention are useful as reagents for differential identification of the tissue(s) or cell type(s) present in a biological sample and for diagnosis of diseases and conditions which include, but are not limited to, skeletal disorders, particularly degenerative joint conditions, such as arthritis, synovial inflammation and other diseases of the joints. Similarly, polypeptides and antibodies directed to these polypeptides are useful in providing immunological probes for differential identification of the tissue(s) or cell type(s). For a number of disorders of the above tissues or cells, particularly of the synovium, expression of this gene at significantly higher or lower levels may be routinely detected in certain tissues or cell types (e.g., skeletal, and cancerous and wounded tissues) or bodily fluids (e.g., lymph, serum, plasma, urine, synovial fluid and spinal fluid) or another tissue or cell sample taken from an individual having such a disorder, relative to the standard gene expression level, i.e., the expression level in healthy tissue or bodily fluid from an individual not having the disorder. The tissue distribution in synovial tissues indicates that polynucleotides and polypeptides corresponding to this gene are useful for the diagnosis and treatment of diseases affecting the synovium of the joints, such as rheumatoid arthritis, osteoarthritis, other inflammatory conditions affecting the joints, as well as in the detection and treatment of disorders and conditions affecting the skeletal system, in particular the connective tissues (e.g. trauma, tendonitis, chrondomalacia and inflammation). Furthermore, the homology to a conserved C. elegans protein may suggest that this protein is important in human development, and thus is beneficial in the diagnosis, prevention, and treatment of developmental disorders. Protein, as well as, antibodies directed against the protein may show utility as a tumor marker and/or immunotherapy targets for the above listed tissues.

[0189] Many polynucleotide sequences, such as EST sequences, are publicly available and accessible through sequence databases. Some of these sequences are related to SEQ ID NO:69 and may have been publicly available prior to conception of the present invention. Preferably, such related polynucleotides are specifically excluded from the scope of the present invention. To list every related sequence is cumbersome. Accordingly, preferably excluded from the present invention are one or more polynucleotides comprising a nucleotide sequence described by the general formula of a-b, where a is any integer between 1 to 1510 of SEQ ID NO:69, b is an integer of 15 to 1524, where both a and b correspond to the positions of nucleotide residues shown in SEQ ID NO:69, and where b is greater than or equal to a+14.

Features of Protein Encoded by Gene No: 60

[0190] In specific embodiments, polypeptides of the invention comprise the following amino acid sequence:

| | |
|---|---|
| LPPQAWRRRPRSPAAPQPFNDSIEWSGYNKPERKGPLALFLVFLFLDTPPLQGDL. | (SEQ ID NO:551) |

Polynucleotides encoding these polypeptides are also encompassed by the invention.

[0191] This gene is expressed primarily in endothelial cells, and to a lesser extent, in brain. Therefore, polynucleotides and polypeptides of the invention are useful as reagents for differential identification of the tissue(s) or cell type(s) present in a biological sample and for diagnosis of diseases and conditions which include, but are not limited to, inflammation and other disorders of the integumentary or vascular system, such as stroke, in addition to neurodegenerative and nervous system disorders. Similarly, polypeptides and antibodies directed to these polypeptides are useful in providing immunological probes for differential identification of the tissue(s) or cell type(s). For a number of disorders of the above tissues or cells, particularly of the endothelial, circulatory, and nervous systems, expression of this gene at significantly higher or lower levels may be routinely detected in certain tissues or cell types (e.g., vascular, endothelial, neural, integumentary, and cancerous and wounded tissues) or bodily fluids (e.g., lymph, serum, plasma, urine, synovial fluid and spinal fluid) or another tissue or cell sample taken from an individual having such a disorder, relative to the standard gene expression level, i.e., the expression level in healthy tissue or bodily fluid from an individual not having the disorder. Preferred epitopes include those comprising a sequence shown in SEQ ID NO. 175 as residues: Ser-4 to Gly-13. The tissue distribution in endothelial cells indicates that polynucleotides and polypeptides corresponding to this gene are useful for the diagnosis and treatment of inflammatory diseases primarily mediated through endothelial cells, such as sepsis, inflammatory bowel disease, psoriasis, and Crohn's disease, as well as stroke. Similarly, the protein would also be useful for the treatment, detection, and/or prevention of a variety of vascular disorders, which include atherosclerosis, embolism, aneurysm, or microvascular disease. In addition, the tissue distribution indicates that polynucleotides and polypeptides corresponding to this gene are useful for the detection/treatment of neurodegenerative disease states and behavioral disorders such as Alzheimers Disease, Parkinsons Disease, Huntingtons Disease, schizophrenia, mania, dementia, paranoia, obsessive compulsive disorder and panic disorder. In addition, the gene or gene product may also play a role in the treatment and/or detection of developmental disorders associated with the developing embryo, or disorders of the cardiovascular system. Protein, as well as, antibodies directed against the protein may show utility as a tumor marker and/or immunotherapy targets for the above listed tissues.

[0192] Many polynucleotide sequences, such as EST sequences, are publicly available and accessible through sequence databases. Some of these sequences are related to SEQ ID NO:70 and may have been publicly available prior to conception of the present invention. Preferably, such related polynucleotides are specifically excluded from the scope of the present invention. To list every related sequence is cumbersome. Accordingly, preferably excluded from the present invention are one or more polynucleotides comprising a nucleotide sequence described by the general formula of a-b, where a is any integer between 1 to 805 of SEQ ID NO:70, b is an integer of 15 to 819, where both a and b correspond to the positions of nucleotide residues shown in SEQ ID NO:70, and where b is greater than or equal to a+14.

Features of Protein Encoded by Gene No: 61

[0193] In specific embodiments, polypeptides of the invention comprise the following amino acid sequence: LLGMSLLWLFLSLIPLRNQPL (SEQ ID NO:552). Polynucleotides encoding these polypeptides are also encompassed by the invention.

[0194] This gene is expressed primarily in fetal brain. Therefore, polynucleotides and polypeptides of the invention are useful as reagents for differential identification of the tissue(s) or cell type(s) present in a biological sample and for diagnosis of diseases and conditions which include, but are not limited to, CNS and peripheral nervous system disorders, or developmental disorders. Similarly, polypeptides and antibodies directed to these polypeptides are useful in providing immunological probes for differential identification of the tissue(s) or cell type(s). For a number of disorders of the above tissues or cells, particularly of the nervous system, expression of this gene at significantly higher or lower levels may be routinely detected in certain tissues or cell types (e.g., neural, developmental, and cancerous and wounded tissues) or bodily fluids (e.g., lymph, serum, amniotic fluid, plasma, urine, synovial fluid and spinal fluid) or another tissue or cell sample taken from an individual having such a disorder, relative to the standard gene expression level, i.e., the expression level in healthy tissue or bodily fluid from an individual not having the disorder. Preferred epitopes include those comprising a sequence shown in SEQ ID NO. 176 as residues: Lys-24 to Ser-30. The tissue distribution in fetal brain indicates that polynucleotides and polypeptides corresponding to this gene are useful for the diagnosis and treatment of neural disorders such as Alzheimer's disease, depression, paranoia, schizophrenia, autism, and particularly developmental brain disorders. Moreover, the expression within fetal tissue indicates that this protein may play a role in the regulation of cellular division, and may show utility in the diagnosis and treatment of cancer and other proliferative disorders. Similarly, developmental tissues rely on decisions involving cell differentiation and/or apoptosis in pattern formation. Thus this protein may also be involved in apoptosis or tissue differentiation and could again be useful in cancer therapy. Protein, as well as, antibodies directed against the protein may show utility as a tumor marker and/or immunotherapy targets for the above listed tissues.

[0195] Many polynucleotide sequences, such as EST sequences, are publicly available and accessible through sequence databases. Some of these sequences are related to SEQ ID NO:71 and may have been publicly available prior to conception of the present invention. Preferably, such related polynucleotides are specifically excluded from the scope of the present invention. To list every related sequence is cumbersome. Accordingly, preferably excluded from the present invention are one or more polynucleotides comprising a nucleotide sequence described by the general formula of a-b, where a is any integer between 1 to 1428 of SEQ ID NO:71, b is an integer of 15 to 1442, where both a and b correspond to the positions of nucleotide residues shown in SEQ ID NO:71, and where b is greater than or equal to a+14.

Features of Protein Encoded by Gene No: 62

[0196] The translation product of this gene shares homology with the conserved 4-nitrophenylphosphatase from Schizosaccharomyces pombe (See Genbank Accession No. gi|1938421). In specific embodiments, polypeptides of the invention comprise the following amino acid sequence:

| | |
|---|---|
| AVMIGDDCRDDVGGA, | (SEQ ID NO:553) |
| ILVKTGKYRASDEEKIN, | (SEQ ID NO:554) |
| EFPSCCGPHSAAPIVKQCVHLKQLE, | (SEQ ID NO:555) |
| PEEAVMIGDDCRDDVGGAQDVGMLGILVKTGKYRASDEEKINPPPYLTCESFPHAVDHILQHLL, | (SEQ ID NO:556) |
| and/or | |
| RDDVGGAQDVGMLGILVKTGKYRASDEEKIN. | (SEQ ID NO:557) |

the invention.

[0197] The gene encoding the disclosed cDNA is thought to reside on chromosome 18. Accordingly, polynucleotides related to this invention are useful as a marker in linkage analysis for chromosome 18. This gene is expressed primarily in endometrial tumor, and to a lesser extent, in leukemia and lymphoma. Therefore, polynucleotides and polypeptides of the invention are useful as reagents for differential identification of the tissue(s) or cell type(s) present in a biological sample and for diagnosis of diseases and conditions which include, but are not limited to, immune, hematopoetic, or reproductive system disorders, particularly cancers. Similarly, polypeptides and antibodies directed to these polypeptides are useful in providing immunological probes for differential identification of the tissue(s) or cell type(s). For a number of disorders of the above tissues or cells, particularly of the endometrium and white blood cells, expression of this gene at significantly higher or lower levels may be routinely detected in certain tissues or cell types (e.g., immune, hematopoetic, reproductive, and cancerous and wounded tissues) or bodily fluids (e.g., lymph, amniotic fluid, serum, plasma, urine, synovial fluid and spinal fluid) or another tissue or cell sample taken from an individual having such a disorder, relative to the standard gene expression level, i.e., the expression level in healthy tissue or bodily fluid from an individual not having the disorder. Preferred epitopes include those comprising a sequence shown in SEQ ID NO. 177 as residues: Val-19 to Cys-24. The tissue distribution in endometrial tumors, leukemia, and lymphoma tissue indicates that polynucleotides and polypeptides corresponding to this gene are useful for the detection, diagnosis, and treatment of cancers, particularly those cancers affecting endometrial tissues and the lymphatic system. In addition, the tissue distribution indicates that polynucleotides and polypeptides corresponding to this gene are useful for the treatment and diagnosis of hematopoetic related disorders such as anemia, pancytopenia, leukopenia, thrombocytopenia or leukemia, since stromal cells are important in the production of cells of hematopoietic lineages. The uses include bone marrow cell ex vivo culture, bone marrow transplantation, bone marrow reconstitution, radiotherapy or chemotherapy of neoplasia. The gene product may also be involved in lymphopoiesis, and therefore it can be used in immune disorders such as infection, inflammation, allergy, immunodeficiency, etc. Furthermore, homology to a conserved S. pombe protein may suggest that this protein is important in development. Therefore, this protein may be beneficial in the diagnosis, prevention, and treatment of developmental disorders. Protein, as well as, antibodies directed against the protein may show utility as a tumor marker and/or immunotherapy targets for the above listed tissues.

[0198] Many polynucleotide sequences, such as EST sequences, are publicly available and accessible through sequence databases. Some of these sequences are related to SEQ ID NO:72 and may have been publicly available prior to conception of the present invention. Preferably, such related polynucleotides are specifically excluded from the scope of the present invention. To list every related sequence is cumbersome. Accordingly, preferably excluded from the present invention are one or more polynucleotides comprising a nucleotide sequence described by the general formula of a-b, where a is any integer between 1 to 1209 of SEQ ID NO:72, b is an integer of 15 to 1223, where both a and b correspond to the positions of nucleotide residues shown in SEQ ID NO:72, and where b is greater than or equal to a+14.

Features of Protein Encoded by Gene No: 63

[0199] The translation product of this gene shares sequence homology with the CP24 protein from Brucella melitensis, which is thought to be a ribosomal releasing factor thought to be important in protein synthesis (See Genbank Accession No. gi|1674445).

[0200] In specific embodiments, polypeptides of the invention comprise the following amino acid sequence:

| | |
|---|---|
| QALYLDLLLRSAFCLILFSGCFQGLSSV, | (SEQ ID NO:558) |
| VQAFCQQQVXSESHPPAQSRSRKRMNMSECSPGRLGLTRTGFCQHGDSLLCRWGRERSPNVPPMGSSRNWALEYCWPQWTFIQGVL | (SEQ ID NO:559) |
| WSSLPDACPVLPLCHRPFG, | |
| NVPPMGSSRNWALEYCWPQWTFIQGVLWSSLPD, | (SEQ ID NO:560) |
| TCLSVPLEGWALQGQASVSMVTVFCVDGGGREVPMCHPWDPAETGLWSIAGPSGLSSKEFFGLHCQMPVQFCHCVIGHLADLFLY, | (SEQ ID NO:561) |
| and/or | |
| HPWDPAETGLWSIAGPSGLSSKEFFGLHCQMPV. | (SEQ ID NO:562) |

polypeptides are also encompassed by the invention.

[0201] This gene is expressed primarily in pancreas tumor, placenta, testis, ovarian cancer, adipocytes, spleen, and fetal liver and heart. Therefore, polynucleotides and polypeptides of the invention are useful as reagents for diagnosis of diseases and conditions which include, but are not limited to, immune, hematopoietic, metabolic, reproductive, developmental, cardiovascular, or vascular diseases. Similarly, polypeptides and antibodies directed to these polypeptides are useful in providing immunological probes for differential identification of the tissue(s) or cell type(s). For a number of disorders of the above tissues or cells, particularly of the immune system, cardiovascular system, digestive system and reproductive system. expression of this gene at significantly higher or lower levels may be routinely detected in certain tissues or cell types (e.g., immune, hematopoietic, reproductive, developmental, metabolic, cardiovascular, vascular, cancerous and wounded tissues) or bodily fluids (e.g., lymph, serum, plasma, amniotic fluid, seminal fluid, urine, synovial fluid and spinal fluid) or another tissue or cell sample taken from an individual having such a disorder, relative to the standard gene expression level, i.e., the expression level in healthy tissue or bodily fluid from an individual not having the disorder. Preferred epitopes include those comprising a sequence shown in SEQ ID NO. 178 as residues: Glu-36 to His-41, Thr-57 to Thr-70, Glu-87 to Met-92, Lys-100 to Lys-105, Ala-197 to Ser-227. The tissue distribution in pancreas, reproductive tissues, and spleen, combined with the homology to ribosomal releasing factor indicates that polynucleotides and polypeptides corresponding to this gene are useful for the treatment and diagnosis of many diseases, especially cancers and immune, vascular, or reproductive diseases. Moreover, the homology to the ribosome releasing factor indicates that the protein may serve as an anticancer agent or an agent that may be useful for the inhibition of proliferative cells. Protein, as well as, antibodies directed against the protein may show utility as a tumor marker and/or immunotherapy targets for the above listed tissues.

[0202] Many polynucleotide sequences, such as EST sequences, are publicly available and accessible through sequence databases. Some of these sequences are related to SEQ ID NO:73 and may have been publicly available prior to conception of the present invention. Preferably, such related polynucleotides are specifically excluded from the scope of the present invention. To list every related sequence is cumbersome. Accordingly, preferably excluded from the present invention are one or more polynucleotides comprising a nucleotide sequence described by the general formula of a-b, where a is any integer between 1 to 1800 of SEQ ID NO:73, b is an integer of 15 to 1814, where both a and b correspond to the positions of nucleotide residues shown in SEQ ID NO:73, and where b is greater than or equal to a+14.

Features of Protein Encoded by Gene No: 64

[0203] The translation product of this gene shares sequence homology with a secretory protein containing thrombospondin motifs from Mus musculus called ADAMTS-1, which is thought to be important in the activation of proteins and the processes of thrombopoiesis and metabolism (See Genbank Accession No. gnl|PID|d1011748). ADAMTS-1 is a new type of ADAM family protein with TSP type I motifs. The TSP homologous domain containing the TSP type I motif of ADAMTS-1 is functional for binding to heparin. ADAMTS-1 mRNA could be induced by stimulating colon 26 cells with an inflammatory cytokine, interleukin-1, in vitro. Moreover, intravenous administration of lipopolysaccharide in mice selectively induced ADAMTS-1 mRNA in kidney and heart. These data suggest that ADAM-TS-1 may be a gene whose expression is associated with various inflammatory processes as well as development of cancer cachexia.

[0204] Thrombospondin is a 450 kDa, multifunctional adhesive glycoprotein released from activated platelets and secreted by growing cells. It binds to components of the cell surface and extracellular milieu. Thrombospondin probably modulates a number of processes, including aggregation of platelets, formation and lysis of fibrin, adhesion and migration of cells, and progression of cells through the growth cycle. Some data indicate that tumor cell production of TSP1 can exert a significant inhibitory effect on tumor progression, which may be attributable in part to a reduction in angiogenesis. Other studies show that activation of latent TGF-beta is mediated by two sequences present in the type I repeats of TSP1, a sequence (GGWSHW) that binds active TGF-beta and potentially orients the TSP molecule, and a second sequence (RFK) that activates latent TGF-beta. Peptides based on these sites have potential therapeutic applications for the modulation of TGF-beta activation. TSP is a homotrimer with a number of functional domains, at least four of which might serve as receptor recognizing regions. The amino-terminal heparin binding domain interacts with heparin, other glycosaminoglycans and glycolipids and likely recognizes specific cell surface proteoglycans. The central disulfide cross-linked region, 210 kDa non-reduced and 70 kDa reduced, contains a peptide motif CSVTCG which is apparently responsible for binding to glycoprotein IV (CD36) with high affinity. Immediately adjacent to the calcium binding region of TSP, which undergoes considerable molecular relaxation in the absence of calcium, is an RGDA sequence. TSP has been demonstrated to bind to integrins of the alpha v beta 3 and alpha IIb beta 3 class. The carboxy-terminal region of TSP also contains at least one binding epitope for a cell receptor. There are 2 well characterized genes for TSP and truncated forms of TSP have been detected which have inhibitory effects on angiogenesis. Finally, TSP can interact with fibrinogen and fibronectin, perhaps on cellular surfaces, which might serve as secondary receptor-like mechanisms for TSP binding and subsequent mediation of cell adhesion. Hemorrhagic toxins are metalloproteases found in some snake venoms which, depending on the member of the family, proteolyze extracellular matrix or basement membrane proteins. This degradation of the blood vessel wall leads to leakage of RBCs to the surrounding tissues. One member also has fibrin as a substrate. These characteristics combined with the TSR could make this gene important in coagulation, either formation or lysis. There also could be wound healing and tumor metastasis implications.

[0205] In specific embodiments, polypeptides of the invention comprise the following amino acid sequence:

| | |
|---|---|
| QSRAGQRGXALPTRTKAPSLRALLRAVSPGAP, | (SEQ ID NO:563) |
| KLVVCFTLFLSKGFSIIVWTVLKVTGSVAHSFAFTVLPSILWDWVVTFPHRVLDSSTARSRTVSPRPPHSPASMKRRIKMLSVGFV | (SEQ ID NO:564) |
| HTLAVDTPFPFSTAGAIRPREVFGLTHQHPTRGAGTPQGATCAGCIRAVFGVLPKCKLALPVGIVRGAREIAWELYGILRLVHQTF | |
| PMTIIQK, | |
| TLAVDTPFPFSTAGAIRPREVFGLTHQHPTR, | (SEQ ID NO:565) |
| FLAPGFTLQ, | (SEQ ID NO:566) |
| DLAHCFYSGTVNGD, | (SEQ ID NO:567) |
| SAAALSLCEGVRGAFYL, | (SEQ ID NO:568) |
| RYVETMLVADQSMA, | (SEQ ID NO:569) |
| FHGSGLKHYLLTLFSVAAR, | (SEQ ID NO:570) |
| EQKGPEVTSNAALTLRNFC, | (SEQ ID NO:571) |
| EHYDTAILFTRQDLCGS, | (SEQ ID NO:572) |
| MADVGTVCDPSRSCSVIEDDGLQAAFTTAHELGHVFNMPHDDAK, | (SEQ ID NO:573) |
| LDHSQPWSPCSAYM, | (SEQ ID NO:574) |
| TSFLDNGHGECLMDKPQNPI, | (SEQ ID NO:575) |
| YDANRQCQFT, | (SEQ ID NO:576) |
| SKHCPDAASTC, | (SEQ ID NO:577) |
| TLWCTGTSGG, | (SEQ ID NO:578) |
| LVCQTKHFPWADGTSCGEGKWC, | (SEQ ID NO:579) |
| WGPWGDCSRTCGGGVQYTMRECDNPVPKNGGKYCEGKRVRYRSCN, | (SEQ ID NO:580) |
| DCPDNNGKTFREEQCEAHNEFSKASFG, | (SEQ ID NO:581) |
| PKYAGVSPKDRCKL, | (SEQ ID NO:582) |
| AKGIGYFF, | (SEQ ID NO:583) |
| VLQPKVVDGTPCSPDSTSVCVQGQCVKAGCDRIIDSKKKFDKCGVCGGNGSTCKK, | (SEQ ID NO:584) |
| RNQRGSRNNGSFLAI, | (SEQ ID NO:585) |
| GATNIEVK, | (SEQ ID NO:586) |
| AADGTYILNG, | (SEQ ID NO:587) |
| VLRYSGSSAALERIRSFSPL KEPLTIQVL, | (SEQ ID NO:588) |
| WVIEEWGECSK, | (SEQ ID NO:589) |
| PASECAKEVKPASTRPCAD, | (SEQ ID NO:590) |
| CSKTCGKGYKKR, | (SEQ ID NO:591) |
| and/or | |
| ESCDPLKKPKH. | (SEQ ID NO:592) |

expressed in bladder, kidney, and ovary. Therefore, polynucleotides and polypeptides of the invention are useful as reagents for differential identification of the tissue(s) or cell type(s) present in a biological sample and for diagnosis of diseases and conditions which include, but are not limited to, urogenital, renal, immune, or reproductive disorders, particularly cancers. Similarly, polypeptides and antibodies directed to these polypeptides are useful in providing immunological probes for differential identification of the tissue(s) or cell type(s). For a number of disorders of the above tissues or cells, particularly of the immune and gastrointestinal systems, expression of this gene at significantly higher or lower levels may be routinely detected in certain tissues or cell types (e.g., urogenital, renal, reproductive, immune, hematopoietic, and cancerous and wounded tissues) or bodily fluids (e.g., serum, plasma, urine, synovial fluid and spinal fluid) or another tissue or cell sample taken from an individual having such a disorder, relative to the standard gene expression level, i.e., the expression level in healthy tissue or bodily fluid from an individual not having the disorder. Preferred epitopes include those comprising a sequence shown in SEQ ID NO. 179 as residues: Gly-8 to Leu-14, Met-18 to Phe-30. The tissue distribution in bladder, kidney, and ovary combined with the homology to the highly conserved thrombospondin protein indicates that the protein product of this gene is useful for the treatment and diagnosis of a variety of blood-related diseases, particularly immune responses to proliferative disorders of urogenital, renal, or reproductive tissues. Moreover, the tissue distribution in kidney indicates that this gene or gene product could be used in the treatment and/or detection of kidney diseases including renal failure, nephritus, renal tubular acidosis, proteinuria, pyuria, edema, pyelonephritis, hydronephritis, nephrotic syndrome, crush syndrome, glomerulonephritis, hematuria, renal colic and kidney stones, in addition to Wilm's Tumor Disease, and congenital kidney abnormalities such as horseshoe kidney, polycystic kidney, and Falconi's syndrome. Protein, as well as, antibodies directed against the protein may show utility as a tumor marker and/or immunotherapy targets for the above listed tissues.

[0206] Many polynucleotide sequences, such as EST sequences, are publicly available and accessible through sequence databases. Some of these sequences are related to SEQ ID NO:74 and may have been publicly available prior to conception of the present invention. Preferably, such related polynucleotides are specifically excluded from the scope of the present invention. To list every related sequence is cumbersome. Accordingly, preferably excluded from the present invention are one or more polynucleotides comprising a nucleotide sequence described by the general formula of a-b, where a is any integer between 1 to 4698 of SEQ ID NO:74, b is an integer of 15 to 4712, where both a and b correspond to the positions of nucleotide residues shown in SEQ ID NO:74, and where b is greater than or equal to a+14.

Features of Protein Encoded by Gene No: 65

[0207] In specific embodiments, polypeptides of the invention comprise the following amino acid sequence:

| | |
|---|---|
| THASGQESLYKICKAYSVYDEDIGYCQGQSFLAAVLLLHMPEEQAFCVLVKIMYDYGLRDLYRNNFEDLHCKFYQLERLMQEQLPD | (SEQ ID NO:593) |
| LHSHFSDLNLEAH, | |
| YSVYDEDIGYCQGQSFLAAVLLLH, | (SEQ ID NO:594) |
| and/or | |
| LYRNNFEDLHCKFYQLERLMQEQLPD. | (SEQ ID NO:595) |

invention.

[0208] The gene encoding the disclosed cDNA is believed to reside on chromosome 1. Accordingly, polynucleotides related to this invention are useful as a marker in linkage analysis for chromosome 1. This gene is expressed primarily in tonsil, placenta, and fetal tissues. Therefore, polynucleotides and polypeptides of the invention are useful as reagents for differential identification of the tissue(s) or cell type(s) present in a biological sample and for diagnosis of diseases and conditions which include, but are not limited to, immune, developmental, reproductive, or vascular disorders. Similarly, polypeptides and antibodies directed to these polypeptides are useful in providing immunological probes for differential identification of the tissue(s) or cell type(s). For a number of disorders of the above tissues or cells, particularly of the immune and reproductive systems, expression of this gene at significantly higher or lower levels may be routinely detected in certain tissues or cell types (e.g., immune, developmental, reproductive, vascular, and cancerous and wounded tissues) or bodily fluids (e.g., serum, amniotic fluid, plasma, urine, synovial fluid and spinal fluid) or another tissue or cell sample taken from an individual having such a disorder, relative to the standard gene expression level, i.e., the expression level in healthy tissue or bodily fluid from an individual not having the disorder. Preferred epitopes include those comprising a sequence shown in SEQ ID NO. 180 as residues: Ala-72 to Arg-77, Val-88 to Tyr-117. The tissue distribution in tonsil indicates that the protein product of this gene is useful for the diagnosis and treatment of diseases of the immune system including many cancers such as lymphomas, leukemias, lymphocytomas, and the like. Moreover, the expression within fetal tissue and other cellular sources marked by proliferating cells indicates that this protein may play a role in the regulation of cellular division, and may show utility in the diagnosis and treatment of cancer and other proliferative disorders. Similarly, developmental tissues rely on decisions involving cell differentiation and/or apoptosis in pattern formation. Thus this protein may also be involved in apoptosis or tissue differentiation and could again be useful in cancer therapy. The protein may also be useful for the treatment, detection, and/or prevention of a variety of vascular disorders which include, but are not limited to, embolism, atherosclerosis, microvascualr disease, stroke, or aneurysm. Protein, as well as, antibodies directed against the protein may show utility as a tumor marker and/or immunotherapy targets for the above listed tissues.

[0209] Many polynucleotide sequences, such as EST sequences, are publicly available and accessible through sequence databases. Some of these sequences are related to SEQ ID NO:75 and may have been publicly available prior to conception of the present invention. Preferably, such related polynucleotides are specifically excluded from the scope of the present invention. To list every related sequence is cumbersome. Accordingly, preferably excluded from the present invention are one or more polynucleotides comprising a nucleotide sequence described by the general formula of a-b, where a is any integer between 1 to 1633 of SEQ ID NO:75, b is an integer of 15 to 1647, where both a and b correspond to the positions of nucleotide residues shown in SEQ ID NO:75, and where b is greater than or equal to a+14.

Features of Protein Encoded by Gene No: 66

[0210] Polypeptides encoded by this gene share homology to steroid/thyroid hormone orphan nuclear receptor and to several additional orphan nuclear receptors isolated from different tissues, such as in T-cells and the brain. Sequence analysis of the 5′ flanking region surrounding +1 revealed several possible response elements such as a hexanucleotide glucocorticoid binding site, a cAMP-response element, a CArG box, and two c-Jun-binding sites.

[0211] In specific embodiments, polypeptides of the invention comprise the following amino acid sequence:

| | |
|---|---|
| QKMYETMKLDACXHQQRPTLQAGPKLLTLAPREEPRGQSGRGSELTARQRHSTGDPQGEQALPRAGCVTGPPATPHRPSEPQLLRT | (SEQ ID NO:596) |
| HPDARPKSAMAQTFVHQGPVALQQLTTNRRVETSMSSDGHGQNPTPSPWADVCASRADAVAFPASGXCHSPWLMXPSSHPLNPHSP | |
| LNLPPPSFHCKDPVMTLHPQTLVTQGHLSTSGRLT, | |
| GPKLLTLAPREEPRGQSGRGSELTARQR, | (SEQ ID NO:597) |
| PKSAMAQTFVHQGPVALQQLTTNRRVETS, | (SEQ ID NO:598) |
| RADAVAFPASGXCHSPWLMXPSSHPLNPH, | (SEQ ID NQ:599) |
| and/or | |
| PPSFHCKDPVMTLHPQTLVTQGHLSTSG. | (SEQ ID NO:600) |

invention.

[0212] This gene is expressed primarily in testis. Therefore, polynucleotides and polypeptides of the invention are useful as reagents for differential identification of the tissue(s) or cell type(s) present in a biological sample and for diagnosis of testicular tumors, impotence, and other reproductive disorders. Similarly, polypeptides and antibodies directed to these polypeptides are useful in providing immunological probes for differential identification of the tissue(s) or cell type(s). For a number of disorders of the above tissues or cells, particularly of the reproductive system, expression of this gene at significantly higher or lower levels may be routinely detected in certain tissues or cell types (e.g., reproductive, testicular, and cancerous and wounded tissues) or bodily fluids (e.g., lymph, serum, plasma, seminal fluid, urine, synovial fluid and spinal fluid) or another tissue or cell sample taken from an individual having such a disorder, relative to the standard gene expression level, i.e., the expression level in healthy tissue or bodily fluid from an individual not having the disorder. The tissue distribution in testes, combined with the homology to steroid/thyroid hormone orphan nuclear receptors indicates that the protein product of this gene is useful for the treatment and diagnosis of diseases in the male reproductive system such as tumors of the testis and other reproductive disorders. As nuclear receptors have the ability to regulate expression of other genes, the protein product of this gene may be useful as a contraceptive by inhibiting the expression of a key determinant in sperm maturation. Furthermore, the protein may serve to inhibit other vital functions in cells of varying tissues and cell types. Protein, as well as, antibodies directed against the protein may show utility as a tumor marker and/or immunotherapy targets for the above listed tissues.

[0213] Many polynucleotide sequences, such as EST sequences, are publicly available and accessible through sequence databases. Some of these sequences are related to SEQ ID NO:76 and may have been publicly available prior to conception of the present invention. Preferably, such related polynucleotides are specifically excluded from the scope of the present invention. To list every related sequence is cumbersome. Accordingly, preferably excluded from the present invention are one or more polynucleotides comprising a nucleotide sequence described by the general formula of a-b, where a is any integer between 1 to 876 of SEQ ID NO:76, b is an integer of 15 to 890, where both a and b correspond to the positions of nucleotide residues shown in SEQ ID NO:76, and where b is greater than or equal to a+14.

Features of Protein Encoded by Gene No: 67

[0214] The translation product of this gene has a high degree of sequence identity with CTGF-4. The protein product of this gene was shown to inhibit adhesion to peripheral blood mononuclear cells.

[0215] In specific embodiments, polypeptides of the invention comprise the following amino acid sequence:

| | |
|---|---|
| MDSMPEPASRCLLLLPLLLLLLLLLPAPELGPSQAGAEENDWVRLPSKCEVCKYVAVELKVKPLRKRQDTEVIGTVYGILDQKASG | (SEQ ID NO:601) |
| VKYTKSDLRLIEVTETICKRLLDYSLHKERTGSXRFAKGMSETFETLHXLVHKGVKVVMDIPYELWNETSAEVADLKKQCDVLVEEFE | |
| EVIEDWYRNHQEEDLTEFLCANHVLKGKDTSCLAEQWSGKKGDTAALGGKKSKKKSIRAKAAGGRSSSSKQRKELGGLEGDPSPEE | |
| DEGIQKASPLTHSPPDEL, | |
| LLSWLLGGTCAVPEAARGNCSARAAGGGTARSFRVRARPG, | (SEQ ID NO:602) |
| EGMPSGCPHPPRGWGLPQGHPAPSFVCCCYSCRLLPWPXCSSSWTSSLPGQLCLPSCRTTALPGNWCLFPSARGWRRGIQSGLPPG | (SEQ ID NO:603) |
| GXCTSPRSPPQTLPPAHHTAS, | |
| RTTALPGNWCLFPSARGWRRGIQSGL, | (SEQ ID NO:604) |
| LLSFKIRGLRTEDAGWAQSSSGGLCVRGDAFWMPSSSSGLGSPSRPPSSFLCLLLLLLPPAALALXLFFLDFFPPRAAVSPFLPDH | (SEQ ID NO:605) |
| CSARQLVSFPFSTWLAQRNSVRSSSWWFLYQSSITSSNSSTSTSHCFLRSATSAEVSFHSS, | |
| AAVSPFLPDHCSARQLVSFPFSTWLAQRNSVRS, | (SEQ ID NO:606) |
| TLGQERNTWGGERTAWATHDGSEFFLGLVSFLGRRGHSQGKEGLKAAGPSRPARAMPLTPQLQNQGSQDRGCWVGSELIRGAVCER | (SEQ ID NO:607) |
| GCLLDALILLGAGVSLKATQLLPLFAAATPAACCLGPXALLLGLLPSQGSCVSLLAGPLLCQATGVFSLQHVVGAEEFSQVFLLVV | |
| XVPVLDHLLKLFHQHITLLLEVSHLCRSLVPQLIGDVHHHLDPFVYQVV, | |
| TWGGERTAWATHDGSEFFLGLVSFLG, | (SEQ ID NO:608) |
| TAWATHDGSEFFLGLVSFLGRRGH, | (SEQ ID NO:609) |
| ARAMPLTPQLQNQGSQDRGCWVGSELIRGAVCE, | (SEQ ID NO:610) |
| SQGSCVSLLAGPLLCQATGVFSLQHVV, | (SEQ ID NO:611) |
| EPFARGSWIIACTRRGPAAIDLPRACQRPLRHYTTWYTKGSRW, | (SEQ ID NO:612) |
| and/or | |
| GERLGSPAQQMRRDLRLIEVTENHLQEAPGL. | (SEQ ID NO:613) |

the invention.

[0216] This gene is expressed in fetal liver/spleen, amniotic cells, and human testes. Therefore, polynucleotides and polypeptides of the invention are useful as reagents for differential identification of the tissue(s) or cell type(s) present in a biological sample and for the diagnosis of cancers, immunological disorders, and neural diseases (such as spinocerebellar ataxia, bipolar affective disorder, schizophrenia, and autism), and other diseases featuring anticipation, neurodegeneration, or abnormalities of neurodevelopment. Similarly, polypeptides and antibodies directed to these polypeptides are useful in providing immunological probes for differential identification of the tissue(s) or cell type(s). For a number of disorders of the above tissues or cells, particularly of the nerve system, immune system, expression of this gene at significantly higher or lower levels may be routinely detected in certain tissues or cell types (e.g., immune, neural, and cancerous and wounded tissues) or bodily fluids (e.g., lymph, serum, plasma, urine, synovial fluid and spinal fluid) or another tissue or cell sample taken from an individual having such a disorder, relative to the standard gene expression level, i.e., the expression level in healthy tissue or bodily fluid from an individual not having the disorder. Preferred epitopes include those comprising a sequence shown in SEQ ID NO. 182 as residues: Ser-3 to Ser-9, Gly-36 to Val-43, Leu-45 to Gly-51. The tissue distribution in fetal liver/spleen combined with the homology to the CTGF-4 protein indicates that the protein product of this gene is useful for the diagnosis and treatment of a variety of immune system disorders. Expression of this gene product indicates a role in regulating the proliferation; survival; differentiation; and/or activation of hematopoietic cell lineages, including blood stem cells. This gene product may be involved in the regulation of cytokine production, antigen presentation, or other processes that may also suggest a usefulness in the treatment of cancer (e.g. by boosting immune responses). Since the gene is expressed in cells of lymphoid origin, the natural gene product may be involved in immune functions. Therefore it may be also used as an agent for immunological disorders including arthritis, asthma, immunodeficiency diseases such as AIDS, leukemia, rheumatoid arthritis, granulomatous disease, inflammatory bowel disease, sepsis, acne, neutropenia, neutrophilia, psoriasis, hypersensitivities, such as T-cell mediated cytotoxicity; immune reactions to transplanted organs and tissues, such as host-versus-graft and graft-versus-host diseases, or autoimmunity disorders, such as autoimmune infertility, lense tissue injury, demyelination, systemic lupus erythematosis, drug induced hemolytic anemia, rheumatoid arthritis, Sjogren's disease, scleroderma and tissues. In addition, this gene product may have commercial utility in the expansion of stem cells and committed progenitors of various blood lineages, and in the differentiation and/or proliferation of various cell types. Moreover, the expression within fetal tissue and other cellular sources marked by proliferating cells indicates that this protein may play a role in the regulation of cellular division, and may show utility in the diagnosis and treatment of cancer and other proliferative disorders. Similarly, developmental tissues rely on decisions involving cell differentiation and/or apoptosis in pattern formation. Thus this protein may also be involved in apoptosis or tissue differentiation and could again be useful in cancer therapy. Moreover, the protein product of this gene may also show utility in the treatment, diagnosis, or prevention of a variety of neural disorders, which include, but are not limited to anticipation, neurodegeneration, or abnormalities of neurodevelopment. Protein, as well as, antibodies directed against the protein may show utility as a tumor marker and/or immunotherapy targets for the above listed tissues.

[0217] Many polynucleotide sequences, such as EST sequences, are publicly available and accessible through sequence databases. Some of these sequences are related to SEQ ID NO:77 and may have been publicly available prior to conception of the present invention. Preferably, such related polynucleotides are specifically excluded from the scope of the present invention. To list every related sequence is cumbersome. Accordingly, preferably excluded from the present invention are one or more polynucleotides comprising a nucleotide sequence described by the general formula of a-b, where a is any integer between 1 to 1643 of SEQ ID NO:77, b is an integer of 15 to 1657, where both a and b correspond to the positions of nucleotide residues shown in SEQ ID NO:77, and where b is greater than or equal to a+14.

Features of Protein Encoded by Gene No: 68

[0218] Polypeptides encoded by polynucleotides comprising this gene contain a zinc finger homology domain. Such motifs are believed to be important for protein interactions, particularly with regard to gene regulation. In specific embodiments, polypeptides of the invention comprise the following amino acid sequence: WPRLKGWRRC (SEQ ID NO:614). Polynucleotides encoding these polypeptides are also encompassed by the invention. This gene is expressed primarily in T cells and the colon and, to a lesser extent, in the testes and placenta. Therefore, polynucleotides and polypeptides of the invention are useful as reagents for differential identification of the tissue(s) or cell type(s) present in a biological sample and for diagnosis of many immune, reproductive, or digestive disorders. Similarly, polypeptides and antibodies directed to these polypeptides are useful in providing immunological probes for differential identification of the tissue(s) or cell type(s). For a number of disorders of the above tissues or cells, particularly of the immune and digestive systems, expression of this gene at significantly higher or lower levels may be routinely detected in certain tissues or cell types (e.g., immune, reproductive, digestive, and cancerous and wounded tissues) or bodily fluids (e.g., lymph, serum, bile, seminal fluid, plasma, urine, synovial fluid and spinal fluid) or another tissue or cell sample taken from an individual having such a disorder, relative to the standard gene expression level, i.e., the expression level in healthy tissue or bodily fluid from an individual not having the disorder. Preferred epitopes include those comprising a sequence shown in SEQ ID NO. 183 as residues: Pro-12 to Lys-33, Asn-41 to His-46, Pro-48 to Ser-58, Gly-71 to Asp-78, Ala-94 to Gly-102, Ser-133 to Ser-140, Arg-197 to Lys-202. The tissue distribution of this gene in T-cells indicates a potential role in the treatment and detection of immune disorders such as arthritis, asthma, immune deficiency diseases (such as AIDS), and leukemia. Expression of this gene in the colon indicates a potential role in the treatment and detection of colon disorders such as ulcers and colon cancer, in addition to digestive disorders in general. Moreover, the protein product of this gene may be useful on the detection, treatment, and/or prevention of normal testicular function. In addition, this gene product may be useful in the treatment of male infertility, and/or could be used as a male contraceptive. Protein, as well as, antibodies directed against the protein may show utility as a tumor marker and/or immunotherapy targets for the above listed tissues.

[0219] Many polynucleotide sequences, such as EST sequences, are publicly available and accessible through sequence databases. Some of these sequences are related to SEQ ID NO:78 and may have been publicly available prior to conception of the present invention. Preferably, such related polynucleotides are specifically excluded from the scope of the present invention. To list every related sequence is cumbersome. Accordingly, preferably excluded from the present invention are one or more polynucleotides comprising a nucleotide sequence described by the general formula of a-b, where a is any integer between 1 to 2001 of SEQ ID NO:78, b is an integer of 15 to 2015, where both a and b correspond to the positions of nucleotide residues shown in SEQ ID NO:78, and where b is greater than or equal to a+14.

Features of Protein Encoded by Gene No: 69

[0220] The translation product of this gene shares sequence homology with neuroendocrine protein, which is thought to be important in neuronal development and differentiation.

[0221] In specific embodiments, polypeptides of the invention comprise the following amino acid sequence:

| | |
|---|---|
| MDGQKKNWKDKVVDLLYWRDIKKTGVVFGASLFLLLSLTVFSIVSVTAYIALALLSVTISFRIYKGVIQAIQKSDEGHPFRAYLES | (SEQ ID NO:615) |
| EVAISEELVQKYSNSALGHVNCTIKELRRLFLVDDLVDSLKFAVLMWVFTYVGALFNGLTLLILALISLFSVPVIYERHQAQIDHYL | |
| GLANKNVKDAMAKIQAKIPGLKRKAE, | |
| KNWKDKVVDLLYWRDIKKTGVVFGASLFLLLS, | (SEQ ID NO:616) |
| RAYLESEVAISEELVQKYSNSALGHV, | (SEQ ID NO:617) |
| LISLFSVPVIYERHQAQIDHYLGLANKNV, | (SEQ ID NO:618) |
| QEMDGQKKNWKDKVVDLLYWRDIKKTGVVFGASLFLLLSLTVFSIVSVTAYIALALLSVTISFRIYKGVIQAIQKSDEGHPFRAYLE | (SEQ ID NO:619) |
| SEVAISEELVQKYSNSALGHVNCTIKELRRLFLVDDLVDSLKFAVLMWVFIYVGALFNGLTLLILALISLFSVPVIYERHQAQIDH | |
| YLGLANKNVKDAMAKIQAKIPGLKRKAE, | |
| DIKKTGVVFGASLFLLLSLTVFSIVSVTAYIALA, | (SEQ ID NO:620) |
| DEGHPFRAYLESEVAISEELVQKYSNSA, | (SEQ ID NO:621) |
| and/or | |
| NGLTLLILALISLFSVPVIYERHQAQIDHYL. | (SEQ ID NO:622) |

[0222] Polynucleotides encoding these polypeptides are also encompassed by the invention.

[0223] This gene is expressed primarily in brain, and, to a lesser extent, in fetal tissue, placenta, bone marrow, and stromal cells. Therefore, polynucleotides and polypeptides of the invention are useful as reagents for diagnosis of neurodegenerative diseases, immune, hematopoietic, or developmental disorders. Similarly, polypeptides and antibodies directed to these polypeptides are useful in providing immunological probes for differential identification of the tissue(s) or cell type(s). For a number of disorders of the above tissues or cells, particularly of the nervous system and during development, expression of this gene at significantly higher or lower levels may be routinely detected in certain tissues or cell types (e.g., neural, immune, hematopoietic, developmental, and cancerous and wounded tissues) or bodily fluids (e.g., lymph, serum, amniotic fluid, plasma, urine, synovial fluid and spinal fluid) or another tissue or cell sample taken from an individual having such a disorder, relative to the standard gene expression level, i.e., the expression level in healthy tissue or bodily fluid from an individual not having the disorder. Preferred epitopes include those comprising a sequence shown in SEQ ID NO. 184 as residues: Gln-47 to Gly-52, Leu-169 to Glu-174. The predominant tissue distribution in brain, combined with the homology to the neuroendocrine protein indicates that the protein product of this gene is useful for the diagnosis and treatment of neurodegenerative diseases and behavioral disorders such as Alzheimer's Disease, Parkinson's Disease, Huntington's Disease, schizophrenia, mania, dementia, paranoia, obsessive-compulsive disorder and panic disorder. Moreover, the expression within fetal tissue and other cellular sources marked by proliferating cells (i.e. placenta) indicates that this protein may play a role in the regulation of cellular division, and may show utility in the diagnosis and treatment of cancer and other proliferative disorders. Similarly, developmental tissues rely on decisions involving cell differentiation and/or apoptosis in pattern formation. Thus, this protein may also be involved in apoptosis or tissue differentiation and could again be useful in cancer therapy. Protein, as well as, antibodies directed against the protein may show utility as a tumor marker and/or immunotherapy targets for the above listed tissues.

[0224] Many polynucleotide sequences, such as EST sequences, are publicly available and accessible through sequence databases. Some of these sequences are related to SEQ ID NO:79 and may have been publicly available prior to conception of the present invention. Preferably, such related polynucleotides are specifically excluded from the scope of the present invention. To list every related sequence is cumbersome. Accordingly, preferably excluded from the present invention are one or more polynucleotides comprising a nucleotide sequence described by the general formula of a-b, where a is any integer between 1 to 1199 of SEQ ID NO:79, b is an integer of 15 to 1213, where both a and b correspond to the positions of nucleotide residues shown in SEQ ID NO:79, and where b is greater than or equal to a+14.

Features of Protein Encoded by Gene No: 70

[0225] Polypeptides encoded by polynucleotides comprising this gene share sequence identity with human hepatoma-derived growth factor (WPI 95-069304/10). As such, polynucleotides comprising this gene can be used for the recombinant production of the protein, which can be used to encourage the growth of various animal cells, and for the purification of receptors.

| | |
|---|---|
| MAVTLSLLLGGRVCA; | (SEQ ID NO:623) |
| PSLAVGSRPGGWRAQALLAGSRTPIPTGSRRNGS | (SEQ ID NO:624) |
| CRRWRAP; | |
| and | |
| MAVTLSLLLGGRVCAPSLAVGSRPGGWRAQALLA | (SEQ ID NO:625) |
| GSRTPIPTGSRRNGSCRRWRAP, | |
| QRPTAEGGLRRHGGYPESLAGRARLRAVTRCGFA | (SEQ ID NO:626) |
| TRGVAGPGPIGREPDPDSDWEPEERELQEVESTL | |
| KRQKQAIRFQKIRRQMEAPGAPPRTLTWEAMEQI | |
| RYLHEEFPESWSVPRLAEGFDVSTDVIRRVLKSK | |
| FLPTLEQKLKQDQKVLKKAGLAHSLQHLRGSGNT | |
| SKLLPAGHSVSGSLLMPGHEASSKDPNHSTALKV | |
| IESDTHRTNTPRRRKGRNKEIQDLEESFVPVAAP | |
| LGHPRELQKYSSDSESPRGTGSGALPSGQKLEEL | |
| KAEEPDNFSSKVVQRGREFFDSNGNFLYRI, | |
| LAGRARLRAVTRCGFATRGVAGPGPI, | (SEQ ID NO:627) |
| APPRTLTWEAMEQIRYLHEEFPESWSVP, | (SEQ ID NO:628) |
| QKVLKKAGLAHSLQHLRGSGNTSKLLPAGHSV, | (SEQ ID NO:629) |
| and/or | |
| PVAAPLGHPRELQKYSSDSESPRGTGSG. | (SEQ ID NO:630) |

the invention.

[0226] The gene encoding the disclosed cDNA is believed to reside on chromosome 15. Accordingly, polynucleotides related to this invention are useful as a marker in linkage analysis for chromosome 15. This gene is expressed primarily in brain, and to a lesser extent, in endotheilium, T cell, and tumors. Therefore, polynucleotides and polypeptides of the invention are useful as reagents for differential identification of the tissue(s) or cell type(s) present in a biological sample and for diagnosis of many neurodegenerative diseases (for example, Alzheimer's Disease, ALS, and the like) and cancers (including, but not limited to neuroblastoma, glioblastoma, Schwannoma, astrocytoma, and the like). Similarly, polypeptides and antibodies directed to these polypeptides are useful in providing immunological probes for differential identification of the tissue(s) or cell type(s). For a number of disorders of the above tissues or cells, particularly of the nervous system, expression of this gene at significantly higher or lower levels may be routinely detected in certain tissues or cell types (e.g., neural, integumentary, immune, hematopoietic, and cancerous and wounded tissues) or bodily fluids (e.g., lymph, serum, plasma, urine, synovial fluid and spinal fluid) or another tissue or cell sample taken from an individual having such a disorder, relative to the standard gene expression level, i.e., the expression level in healthy tissue or bodily fluid from an individual not having the disorder. Preferred epitopes include those comprising a sequence shown in SEQ ID NO. 185 as residues: Thr-42 to Pro-56. The tissue distribution in brain indicates that the protein product of this gene is useful for the treatment and diagnosis of many neurodegenerative diseases and cancers. Similarly, the protein product of this gene is useful for the detection/treatment of neurodegenerative disease states, behavioral disorders, or inflammatory conditions which include, but are not limited to Alzheimer's Disease, Parkinson's Disease, Huntington's Disease, Tourette Syndrome, meningitis, encephalitis, demyelinating diseases, peripheral neuropathies, neoplasia, trauma, congenital malformations, spinal cord injuries, ischemia and infarction, aneurysms, hemorrhages, schizophrenia, mania, dementia, paranoia, obsessive compulsive disorder, depression, panic disorder, learning disabilities, ALS, psychoses, autism, and altered behaviors, including disorders in feeding, sleep patterns, balance, and perception. In addition, elevated expression of this gene product in regions of the brain indicates that it plays a role in normal neural function. Potentially, this gene product is involved in synapse formation, neurotransmission, learning, cognition, homeostasis, or neuronal differentiation or survival. Moreover, the expression within epithelium indicates that the protein product of this gene is useful for the treatment, diagnosis, and/or prevention of various skin disorders, which include, but are not limited to, congenital disorders (i.e. nevi, moles, freckles, Mongolian spots, hemangiomas, port-wine syndrome), integumentary tumors (i.e. keratoses, Bowen's disease, basal cell carcinoma, squamous cell carcinoma, malignant melanoma, Paget's disease, mycosis fungoides, and Kaposi's sarcoma), injuries and inflammation of the skin (i.e. wounds, rashes, prickly heat disorder, psoriasis, dermatitis), atherosclerosis, uticaria, eczema, photosensitivity, autoimmune disorders (i.e. lupus erythematosus, vitiligo, dermatomyositis, morphea, scleroderma, pemphigoid, and pemphigus), keloids, striae, erythema, petechiae, purpura, and xanthelasma. Protein, as well as, antibodies directed against the protein may show utility as a tumor marker and/or immunotherapy targets for the above listed tissues.

[0227] Many polynucleotide sequences, such as EST sequences, are publicly available and accessible through sequence databases. Some of these sequences are related to SEQ ID NO:80 and may have been publicly available prior to conception of the present invention. Preferably, such related polynucleotides are specifically excluded from the scope of the present invention. To list every related sequence is cumbersome. Accordingly, preferably excluded from the present invention are one or more polynucleotides comprising a nucleotide sequence described by the general formula of a-b, where a is any integer between 1 to 1377 of SEQ ID NO:80, b is an integer of 15 to 1391, where both a and b correspond to the positions of nucleotide residues shown in SEQ ID NO:80, and where b is greater than or equal to a+14.

Features of Protein Encoded by Gene No: 71

[0228] The translation product of this gene shares sequence homology with acrosin, trypsin, as well as trypsinogen precursor, which are thought to be important in cell-cell recognition and proteinase activity for protein cleavage and degradation.

[0229] In specific embodiments, polynucleotides of the invention comprise the following sequence:

| | |
|---|---|
| gatgttacacagctctttaataatagtggccata | (SEQ ID NO:631) |
| gctgtaataacaatgacaacagtaggtaacggta | |
| gtcataccaacagtagggcagtgcattttatatt | |
| acaactggtttcttgctctagtaggcttggggat | |
| gggtgaagacggacagggctggcgcagacccttt | |
| ccttctcctctccagcccacagtgatctgggctt | |
| ttacaagacagcctgcttccattcagtagtgtgg | |
| gaaagttccttcttggcttagcaatacccctgag | |
| accttgttcagtgggctgtgtctctccctgggat | |
| gctgggagcaccaagtgtggccgagctagggctg | |
| ctgacttcctctgggcgcctctgggctgcgaggg | |
| tctcttataggaattgaggccctttgctgctcca | |
| agaaatgctgaggctgtgggcaragggktgtacc | |
| caaggggactcttgctctgtgtctgactttgggg | |
| ratcc, | |
| cacagctctttaataatagtggccatagctgtaa | (SEQ ID NO:632) |
| taacaatgacaacagtaggtaacg, | |
| tgtgtctctccctgggatgctgggagcaccaagt | (SEQ ID NO:633) |
| gtggccgagctagggctgctgactt, | |
| gcgagggtctcttataggaattgaggccctttgc | (SEQ ID NO:634) |
| tgctccaagaaatgctgaggctgtgggcaraggg | |
| ktgtacccaaggggact. | |

[0230] In specific embodiments, polypeptides of the invention comprise the following amino acid sequence:

| | |
|---|---|
| CCCPFAVLGAASFLPCPPGDXPKSDTEQESPWVX | (SEQ ID NO:635) |
| PXAHSLSISWSSKGPQFL, | |
| CTNLTSGMWWASLAGAMAAGARAPQEYTPRSQPI | (SEQ ID NO:636) |
| STGSTMSGRLSCNAAAPLQCWEPLPSCPAHLGIP | |
| QSQTQSKSPLGYXPLFTASAFLGAAKGLNSYKRP | |
| SQPRGAQRKSAALARPHLVLPASQGETQPTEQGL | |
| RGIAKPRRNFPTLLNGSRLSCKSPDHCGLERRRK | |
| GSAPALSVFTHPQAY, | |
| LQCWEPLPSCPAHLGIPQSQTQSKSPLGYXPL, | (SEQ ID NO:637) |
| PTEQGLRGIAKPRRNFPTLLNGSRLSCKS, | (SEQ ID NO:638) |
| PQLTMPTTCHWSDWYIRGPPLSPWQVSTPPSGMP | (SEQ ID NO:639) |
| AHIIFSVTSPWYASSAXHRVLSMTWTDACSSMSD | |
| IFPPFCFVKPHPMIQSGVAGVSSSSKKGRQMGLT | |
| VPEKVSGNCSFMRAMS, | |
| GPPLSPWQVSTPPSGMPAHIIFSVTSPWYAS, | (SEQ ID NO:640) |
| CFVKPHPMIQSGVAGVSSSSKKGR, | (SEQ ID NO:641) |
| AVMLLPLCSAGSRFLPALPTWGXPKVRHRARVPL | (SEQ ID NO:642) |
| GTXLCPQPQHFLEQQRASIPIRDPRSPEAPRGSQ | |
| QP, | |
| and/or | |
| AGSRFLPALPTWGXPKVRHRARVPLGTXLCPQPQ | (SEQ ID NO:643) |
| HF. | |

encompassed by the invention.

[0231] This gene is expressed primarily in cheek carcinoma, and to a lesser extent, in uterine and pancreatic cancers. Therefore, polynucleotides and polypeptides of the invention are useful as reagents for differential identification of the tissue(s) or cell type(s) present in a biological sample and for diagnosis of diseases and conditions which include, but are not limited to, integumentary, mucosal, gastrointestinal, digestive, or reproductive disorders, particularly cheek cancers or cancers of uterine and pancreatic origins. Similarly, polypeptides and antibodies directed to these polypeptides are useful in providing immunological probes for differential identification of the tissue(s) or cell type(s). For a number of disorders of the above tissues or cells, particularly of the neoplastic tissues, expression of this gene at significantly higher or lower levels may be routinely detected in certain tissues or cell types (e.g., integumentary, mucosal, gastrointestinal, digestive, reproductive, and cancerous and wounded tissues) or bodily fluids (e.g., lymph, serum, bile, plasma, urine, synovial fluid and spinal fluid) or another tissue or cell sample taken from an individual having such a disorder, relative to the standard gene expression level, i.e., the expression level in healthy tissue or bodily fluid from an individual not having the disorder. Preferred epitopes include those comprising a sequence shown in SEQ ID NO. 186 as residues: Thr-39 to Gly-44. The tissue distribution in cheek, uterine, and pancreatic tumors, combined with the homology to acrosin and trypsin, indicates that polynucleotides and polypeptides corresponding to this gene are useful for the diagnosis and intervention of cancers. The homology to acrosin and trypsin may indicate the gene function in tumor metastasis or migration, since in both cases cell-cell interaction and extracellular matrix degradation may be involved. The gene product can also be used as a target for cancer immunotherapy or as a diagnostic marker. Protein, as well as, antibodies directed against the protein may show utility as a tumor marker and/or immunotherapy targets for the above listed tissues.

[0232] Many polynucleotide sequences, such as EST sequences, are publicly available and accessible through sequence databases. Some of these sequences are related to SEQ ID NO:81 and may have been publicly available prior to conception of the present invention. Preferably, such related polynucleotides are specifically excluded from the scope of the present invention. To list every related sequence is cumbersome. Accordingly, preferably excluded from the present invention are one or more polynucleotides comprising a nucleotide sequence described by the general formula of a-b, where a is any integer between 1 to 994 of SEQ ID NO:81, b is an integer of 15 to 1008, where both a and b correspond to the positions of nucleotide residues shown in SEQ ID NO:81, and where b is greater than or equal to a+14.

Features of Protein Encoded by Gene No: 72

[0233] In specific embodiments, polypeptides of the invention comprise the following amino acid sequence: PQDAGKAYSDRHMCSV (SEQ ID NO:644). Polynucleotides encoding these polypeptides are also encompassed by the invention. The gene encoding the disclosed cDNA is believed to reside on chromosome 3. Accordingly, polynucleotides related to this invention are useful as a marker in linkage analysis for chromosome 3. This gene is expressed primarily in T helper cells 1, T-cells stimulated with PHA for 24 hours, and in a placenta Nb2HP cDNA library. Therefore, polynucleotides and polypeptides of the invention are useful as reagents for differential identification of the tissue(s) or cell type(s) present in a biological sample and for diagnosis of many immunodeficiencies and disorders (especially autoimmune diseases), in addition to reproductive disorders. Similarly, polypeptides and antibodies directed to these polypeptides are useful in providing immunological probes for differential identification of the tissue(s) or cell type(s). For a number of disorders of the above tissues or cells, particularly of the immune system expression of this gene at significantly higher or lower levels may be routinely detected in certain tissues or cell types (e.g., immune, hematopoietic, reproductive, and cancerous and wounded tissues) or bodily fluids (e.g., lymph, serum, plasma, urine, synovial fluid and spinal fluid) or another tissue or cell sample taken from an individual having such a disorder, relative to the standard gene expression level, i.e., the expression level in healthy tissue or bodily fluid from an individual not having the disorder. The tissue distribution in T-helper and T-cells indicates that the protein product of this gene is useful for the diagnosis and treatment of autoimmune diseases, immunodeficiencies, and other immune system disorders. This gene product may be involved in the regulation of cytokine production, antigen presentation, or other processes that may also suggest a usefulness in the treatment of cancer (e.g. by boosting immune responses). Since the gene is expressed in cells of lymphoid origin, the natural gene product may be involved in immune functions. Therefore it may be also used as an agent for immunological disorders including arthritis, asthma, immunodeficiency diseases such as AIDS, leukemia, rheumatoid arthritis, granulomatous disease, inflammatory bowel disease, sepsis, acne, neutropenia, neutrophilia, psoriasis, hypersensitivities, such as T-cell mediated cytotoxicity; immune reactions to transplanted organs and tissues, such as host-versus-graft and graft-versus-host diseases, or autoimmunity disorders, such as autoimmune infertility, lense tissue injury, demyelination, systemic lupus erythematosis, drug induced hemolytic anemia, rheumatoid arthritis, Sjogren's disease, scleroderma and tissues. In addition, this gene product may have commercial utility in the expansion of stem cells and committed progenitors of various blood lineages, and in the differentiation and/or proliferation of various cell types. Protein, as well as, antibodies directed against the protein may show utility as a tumor marker and/or immunotherapy targets for the above listed tissues.

[0234] Many polynucleotide sequences, such as EST sequences, are publicly available and accessible through sequence databases. Some of these sequences are related to SEQ ID NO:82 and may have been publicly available prior to conception of the present invention. Preferably, such related polynucleotides are specifically excluded from the scope of the present invention. To list every related sequence is cumbersome. Accordingly, preferably excluded from the present invention are one or more polynucleotides comprising a nucleotide sequence described by the general formula of a-b, where a is any integer between 1 to 1247 of SEQ ID NO:82, b is an integer of 15 to 1261, where both a and b correspond to the positions of nucleotide residues shown in SEQ ID NO:82, and where b is greater than or equal to a+14.

Features of Protein Encoded by Gene No: 73

[0235] When tested against Jurket cell lines, supernatants removed from cells containing this gene activated the GAS (gamma activating sequence) promoter element. Thus, it is likely that this gene activates immune cells, particularly T-cells, through the JAK-STAT signal transduction pathway. GAS (gamma activating sequence)—a promoter element found upstream of many genes which are involved in the Jak-STAT pathway. The Jak-STAT pathway is a large, signal transduction pathway involved in the differentiation and proliferation of cells. Therefore, activation of the Jak-STAT pathway, reflected by the binding of the GAS element, can be used to indicate proteins involved in the proliferation and differentiation of cells. The gene encoding the disclosed cDNA is believed to reside on chromosome 1. Accordingly, polynucleotides related to this invention are useful as a marker in linkage analysis for chromosome 1. This gene is expressed primarily in 7 week old early stage human, human chronic synovitis, and infant brain. Therefore, polynucleotides and polypeptides of the invention are useful as reagents for differential identification of the tissue(s) or cell type(s) present in a biological sample and for diagnosis of developmental, neural, or skeletal disorders, particularly chronic synovitis, or congenital defects. Similarly, polypeptides and antibodies directed to these polypeptides are useful in providing immunological probes for differential identification of the tissue(s) or cell type(s). For a number of disorders of the above tissues or cells, particularly of the synovium, expression of this gene at significantly higher or lower levels may be routinely detected in certain tissues or cell types (e.g., neural, skeletal, developmental, and cancerous and wounded tissues) or bodily fluids (e.g., lymph, amniotic fluid, serum, plasma, urine, synovial fluid and spinal fluid) or another tissue or cell sample taken from an individual having such a disorder, relative to the standard gene expression level, i.e., the expression level in healthy tissue or bodily fluid from an individual not having the disorder. Preferred epitopes include those comprising a sequence shown in SEQ ID NO. 188 as residues: Ser-44 to Pro-49. The tissue distribution in chronic synovitis, combined with the detected GAS biological activity indicates that the protein product of this gene is useful for the diagnosis and treatment of chronic synovitis and other disorders of the synovium, particularly inflammatory conditions. Moreover, the expression within brain indicates the protein product of this gene is useful for the detection/treatment of neurodegenerative disease states, behavioral disorders, or inflammatory conditions which include, but are not limited to Alzheimer's Disease, Parkinson's Disease, Huntington's Disease, Tourette Syndrome, meningitis, encephalitis, demyelinating diseases, peripheral neuropathies, neoplasia, trauma, congenital malformations, spinal cord injuries, ischemia and infarction, aneurysms, hemorrhages, schizophrenia, mania, dementia, paranoia, obsessive compulsive disorder, depression, panic disorder, learning disabilities, ALS, psychoses, autism, and altered behaviors, including disorders in feeding, sleep patterns, balance, and perception. In addition, elevated expression of this gene product in regions of the brain indicates that it plays a role in normal neural function. Potentially, this gene product is involved in synapse formation, neurotransmission, learning, cognition, homeostasis, or neuronal differentiation or survival. Moreover, the expression within embryonic tissue and other cellular sources marked by proliferating cells indicates that this protein may play a role in the regulation of cellular division, and may show utility in the diagnosis and treatment of cancer and other proliferative disorders. Similarly, developmental tissues rely on decisions involving cell differentiation and/or apoptosis in pattern formation. Thus, this protein may also be involved in apoptosis or tissue differentiation and could again be useful in cancer therapy. Protein, as well as, antibodies directed against the protein may show utility as a tumor marker and/or immunotherapy targets for the above listed tissues.

[0236] Many polynucleotide sequences, such as EST sequences, are publicly available and accessible through sequence databases. Some of these sequences are related to SEQ ID NO:83 and may have been publicly available prior to conception of the present invention. Preferably, such related polynucleotides are specifically excluded from the scope of the present invention. To list every related sequence is cumbersome. Accordingly, preferably excluded from the present invention are one or more polynucleotides comprising a nucleotide sequence described by the general formula of a-b, where a is any integer between 1 to 1031 of SEQ ID NO:83, b is an integer of 15 to 1045, where both a and b correspond to the positions of nucleotide residues shown in SEQ ID NO:83, and where b is greater than or equal to a+14.

Features of Protein Encoded by Gene No: 74

[0237] Polypeptides encoded by polynucleotides comprising this gene exhibit sequence homology to a number of mucin-like extracellular or cell surface proteins.

[0238] In specific embodiments, polypeptides of the invention comprise the following amino acid sequence:

| | |
|---|---|
| MVGPVTLHKKIHTTTVLFIVQIHILLIQAITQ | (SEQ ID NO:645) |
| AK, | |
| LQMHLMILQMTGLSILALLGKSTTTIVEQKFHNG | (SEQ ID NO:646) |
| KNQKSGLKENRDKKKQTRWQSTASQKIGITEER; | |
| MVGPVTLHKKIHTTTVLFIVQIHILLIQAITQAK | (SEQ ID NO:647) |
| LQMHLMILQMTGLSILALLGKSTTTIVEQKFHNG | |
| KNQKSGLKENRDKKKQTRWQSTASQKIGITEER, | |
| GLQKRGDHRHEKMRDAGDPSPPNKMLRRSDSPEN | (SEQ ID NO:648) |
| KYSDSTGHSKAKNVHTHRVRERDGGTSYSPQENS | |
| HNHSALHSSNSHSSNPSNPSKTSDAPYDSADDWS | |
| EHISSSGKKYYYNCRTEVSQWEKPKEWLEREQRQ | |
| KEANKMAVNSFPKDRDYRREVMQATATSGFASGM | |
| EDKHSSDASSLLPQNILSQTSRHNDRDYRLPRAE | |
| THSSSTPVQHPIKPVVHPTATPSTVPSSPFTLQS | |
| DHQPKKSFDANGASTLSKLPTPTSSVPAQKTERK | |
| ESTSGDKPVSHSCTTPSTSSASGLNPTSAPPTSA | |
| SAVPVSPVPQSPIPPLLQDPNLLRQLLPALQATL | |
| QLNNSNVDISKINEVLTAAVTQASLQSIIHKFLT | |
| AGPSAFNITSLISQAAQLSTQAQPSNQSPMSLTS | |
| DASSPRSYVSPRISTPQTNTVPIKPLISTPPVSS | |
| QPKVSTPVVKQGPVSQSATQQPVTADKXQGHEPV | |
| SPRSLQRSSSQRSPSPGPNHTSNSSNASNATVVP | |
| QNSSARSTCSLTPALAAHFSENLIKHVQGWPADH | |
| AEKQASRLREEAHNMGTLHMSEICTELKNLRSLV | |
| RVCEIQATLREQRDTIFETTN, | |
| DAGDPSPPNKMLRRSDSPENKYSDSTGHSK, | (SEQ ID NO:649) |
| NHSALHSSNSHSSNPSNNPSKTSDAPYDSADDW, | (SEQ ID NO:650) |
| ANKMAVNSFPKDRDYRREVMQATATSGFASGME | (SEQ ID NO:651) |
| DK, | |
| VVHPTATPSTVPSSPFTLQSDHQPKKSFDANGA | (SEQ ID NO:652) |
| ST, | |
| SGDKPVSHSCTTPSTSSASGLNPTSAPPTSAS | (SEQ ID NO:653) |
| AV, | |
| ISKINEVLTAAVTQASLQSIIHKFLTAGPSAFNI | (SEQ ID NO:654) |
| TSL, | |
| PGPNHTSNSSNASNATVVPQNSSARSTCSLTP | (SEQ ID NO:655) |
| AL, | |
| LREEAHNMGTIHMSEICTELKNLRSLVRVC, | (SEQ ID NO:656) |
| NSARDKMAVNSFPKDRDYRREVITDMKRCETPEI | (SEQ ID NO:657) |
| LHHQIKCCGDLIVLKTNTVTAQVTVRPKMCILTE | |
| LERGMVGPVTLHKKIHTTTVLFIVQIHILLIQAI | |
| TQAKLQMHLMILQMTGLSILALLGKSTTTIVEQK | |
| FHNGKNQKSGLKENRDKKKQTRWQSTASQKIGIT | |
| EER, | |
| VITDMKRCETPEILHHQIKCCGDLIVLKTNTV, | (SEQ ID NO:658) |
| TVLFIVQIHILLIQAITQAKLQMHLMILQMT, | (SEQ ID NO:659) |
| STTTIVEQKFHNGKNQKSGLKENRDKKKQTRW | (SEQ ID NO:660) |
| QS, | |
| CKQQPLVGLPVEWKTSIPVMPVVCSHRIFCLKQA | (SEQ ID NO:661) |
| DTMTETTDCQEQRLTVVLRQYSTPSNQWFIQLLP | |
| QALFLLVHLRYSLITSQRNHLMLMEHLLYQNCLH | |
| PHLLSLHRKQKEKNLHQETNPYHILAQLLPRLLP | |
| LD, | |
| SIPVMPVVCSHRIFCLKQADTMTETTDCQEQ, | (SEQ ID NO:662) |
| PSNQWFIQLLPQALFLLVHLRYSLITSQR, | (SEQ ID NO:663) |
| and/or | |
| YQNCLHPHLLSLHRKQKEKNLHQETN. | (SEQ ID NO:664) |

invention.

[0239] The gene encoding the disclosed cDNA is believed to reside on chromosome 10. Accordingly, polynucleotides related to this invention are useful as a marker in linkage analysis for chromosome 10. This gene is expressed primarily in ovarian cancer, endometrial tumor, B-cell lymphoma, brain-medulloblastoma, hepatocellular tumor, osteosarcoma, and T- and B-cells. Therefore, polynucleotides and polypeptides of the invention are useful as reagents for differential identification of the tissue(s) or cell type(s) present in a biological sample and for diagnosis of diseases and conditions which include, but are not limited to, ovarian cancer, endometrial tumors, B-cell lymphoma, brain medulloblastoma, hepatocellular tumor, and osteosarcoma, and proliferative conditions in other tissues. Similarly, polypeptides and antibodies directed to these polypeptides are useful in providing immunological probes for differential identification of the tissue(s) or cell type(s). For a number of disorders of the above tissues or cells, particularly of the immune system, expression of this gene at significantly higher or lower levels may be routinely detected in certain tissues or cell types (e.g., reproductive, immune, hematopoietic, neural, skeletal, and cancerous and wounded tissues) or bodily fluids (e.g., lymph, serum, plasma, urine, synovial fluid and spinal fluid) or another tissue or cell sample taken from an individual having such a disorder, relative to the standard gene expression level, i.e., the expression level in healthy tissue or bodily fluid from an individual not having the disorder. Preferred epitopes include those comprising a sequence shown in SEQ ID NO. 189 as residues: Lys-74 to Ala-101. The tissue distribution in proliferative tissues indicates that the protein product of this gene is useful for the diagnosis and treatment of ovarian cancer, endometrial tumors, B-cell lymphoma, brain medulloblastoma, hepatocellular tumor, and osteosarcoma. Expression within cellular sources marked by proliferating cells indicates that this protein may play a role in the regulation of cellular division, and may show utility in the diagnosis and treatment of cancer and other proliferative disorders. Similarly, developmental tissues rely on decisions involving cell differentiation and/or apoptosis in pattern formation. Thus this protein may also be involved in apoptosis or tissue differentiation and could again be useful in cancer therapy. Protein, as well as, antibodies directed against the protein may show utility as a tumor marker and/or immunotherapy targets for the above listed tissues.

[0240] Many polynucleotide sequences, such as EST sequences, are publicly available and accessible through sequence databases. Some of these sequences are related to SEQ ID NO:84 and may have been publicly available prior to conception of the present invention. Preferably, such related polynucleotides are specifically excluded from the scope of the present invention. To list every related sequence is cumbersome. Accordingly, preferably excluded from the present invention are one or more polynucleotides comprising a nucleotide sequence described by the general formula of a-b, where a is any integer between 1 to 2863 of SEQ ID NO:84, b is an integer of 15 to 2877, where both a and b correspond to the positions of nucleotide residues shown in SEQ ID NO:84, and where b is greater than or equal to a+14.

Features of Protein Encoded by Gene No: 75

[0241] In specific embodiments, polypeptides of the invention comprise the following amino acid sequence:

(SEQ ID NO:665)

MQTCPLVGTLLTRNMDGYTCAVVTSTSFWIISAWXLWKGSPSTSMPTMPE
TPLRTLCCTKMPSIFSSLMTDGRA.

[0242] Polynucleotides encoding these polypeptides are also encompassed by the invention. This polypeptide sequence has sequence homology with a Drosophila melanogaster male germ-line specific transcript which encodes a putative protamine molecule (see, gi|608696). The gene encoding the disclosed cDNA is believed to reside on chromosome 14. Accordingly, polynucleotides related to this invention are useful as a marker in linkage analysis for chromosome 14. This gene is expressed primarily in breast tissue, and to a lesser extent in, fetal and adult cells and tissues, especially those comprising endocrine organs. Therefore, polynucleotides and polypeptides of the invention are useful as reagents for differential identification of the tissue(s) or cell type(s) present in a biological sample and for diagnosis of diseases and conditions which include, but are not limited to, developmental and reproductive disorders, or defects. Similarly, polypeptides and antibodies directed to these polypeptides are useful in providing immunological probes for differential identification of the tissue(s) or cell type(s). For a number of disorders of the above tissues or cells, particularly of the female reproductive system, expression of this gene at significantly higher or lower levels may be routinely detected in certain tissues or cell types (e.g., reproductive, endocrine, reproductive, and cancerous and wounded tissues) or bodily fluids (e.g., lymph, serum, breast milk, plasma, urine, synovial fluid and spinal fluid) or another tissue or cell sample taken from an individual having such a disorder, relative to the standard gene expression level, i.e., the expression level in healthy tissue or bodily fluid from an individual not having the disorder. Preferred epitopes include those comprising a sequence shown in SEQ ID NO. 190 as residues: Ser-100 to Gln-106. The tissue distribution in breast and fetal tissues indicates that the protein product of this gene is useful for the study and treatment of developmental, reproductive and growth and metabolic disorders. Similarly, the expression within embryonic tissue and other cellular sources marked by proliferating cells indicates that this protein may play a role in the regulation of cellular division, and may show utility in the diagnosis and treatment of cancer and other proliferative disorders. Similarly, developmental tissues rely on decisions involving cell differentiation and/or apoptosis in pattern formation. Thus, this protein may also be involved in apoptosis or tissue differentiation and could again be useful in cancer therapy. Protein, as well as, antibodies directed against the protein may show utility as a tumor marker and/or immunotherapy targets for the above listed tissues.

[0243] Many polynucleotide sequences, such as EST sequences, are publicly available and accessible through sequence databases. Some of these sequences are related to SEQ ID NO:85 and may have been publicly available prior to conception of the present invention. Preferably, such related polynucleotides are specifically excluded from the scope of the present invention. To list every related sequence is cumbersome. Accordingly, preferably excluded from the present invention are one or more polynucleotides comprising a nucleotide sequence described by the general formula of a-b, where a is any integer between 1 to 1353 of SEQ ID NO:85, b is an integer of 15 to 1367, where both a and b correspond to the positions of nucleotide residues shown in SEQ ID NO:85, and where b is greater than or equal to a+14.

Features of Protein Encoded by Gene No: 76

[0244] In specific embodiments, polypeptides of the invention comprise the following amino acid sequence:

(SEQ ID NO:666)

MTLIQNCWYSWLFFGFFFHFLRKSISIFSIFLVCFRILALGPTCFLVWFW
KAFFRHILIFICLSREVFRPRCFLVYFR.

Polynucleotides encoding these polypeptides are also encompassed by the invention.

[0245] This polypeptide sequence has sequence homology with the MURF4 protein of Herpetomonas muscarum (See Genbank Accession No. S43288). Such RNA-editing enzymes may be useful as molecular targets in the intervention of the life cycle of trypanosomes and other protozoa. This gene is expressed primarily in fetal liver and spleen, osteosarcoma and bone marrow. Therefore, polynucleotides and polypeptides of the invention are useful as reagents for differential identification of the tissue(s) or cell type(s) present in a biological sample and for diagnosis of immune, hematopoietic, hepatic, or skeletal disorders, particularly liver tumors, osteosarcoma, and other cancers. Similarly, polypeptides and antibodies directed to these polypeptides are useful in providing immunological probes for differential identification of the tissue(s) or cell type(s). For a number of disorders of the above tissues or cells, particularly of the immune system, expression of this gene at significantly higher or lower levels may be routinely detected in certain tissues or cell types (e.g., immune, hematopoietic, hepatic, skeletal, and cancerous and wounded tissues) or bodily fluids (e.g., lymph, serum, plasma, urine, synovial fluid and spinal fluid) or another tissue or cell sample taken from an individual having such a disorder, relative to the standard gene expression level, i.e., the expression level in healthy tissue or bodily fluid from an individual not having the disorder. The tissue distribution in fetal liver and osteosarcoma, indicates that the protein product of this gene is useful for diagnosis of cancers such as liver tumor and osteosarcoma. Moreover, the expression within fetal liver/spleen and bone marrow indicates that the protein product of this gene is useful for the treatment and diagnosis of hematopoietic related disorders such as anemia, pancytopenia, leukopenia, thrombocytopenia or leukemia since stromal cells are important in the production of cells of hematopoietic lineages. The uses include bone marrow cell ex vivo culture, bone marrow transplantation, bone marrow reconstitution, radiotherapy or chemotherapy of neoplasia. The gene product may also be involved in lymphopoiesis, therefore, it can be used in immune disorders such as infection, inflammation, allergy, immunodeficiency etc. In addition, this gene product may have commercial utility in the expansion of stem cells and committed progenitors of various blood lineages, and in the differentiation and/or proliferation of various cell types. Furthermore, the expression within fetal tissue and other cellular sources marked by proliferating cells indicates that this protein may play a role in the regulation of cellular division, and may show utility in the diagnosis and treatment of cancer and other proliferative disorders. Similarly, developmental tissues rely on decisions involving cell differentiation and/or apoptosis in pattern formation. Thus this protein may also be involved in apoptosis or tissue differentiation and could again be useful in cancer therapy. Protein, as well as, antibodies directed against the protein may show utility as a tumor marker and/or immunotherapy targets for the above listed tissues.

[0246] Many polynucleotide sequences, such as EST sequences, are publicly available and accessible through sequence databases. Some of these sequences are related to SEQ ID NO:86 and may have been publicly available prior to conception of the present invention. Preferably, such related polynucleotides are specifically excluded from the scope of the present invention. To list every related sequence is cumbersome. Accordingly, preferably excluded from the present invention are one or more polynucleotides comprising a nucleotide sequence described by the general formula of a-b, where a is any integer between 1 to 996 of SEQ ID NO:86, b is an integer of 15 to 1010, where both a and b correspond to the positions of nucleotide residues shown in SEQ ID NO:86, and where b is greater than or equal to a+14.

Features of Protein Encoded by Gene No: 77

[0247] In specific embodiments, polypeptides of the invention comprise the following amino acid sequence:

| | |
|---|---|
| DFIYIYTHTHTHPKSFYIIKLSYYY, | (SEQ ID NO:667) |
| VLVCLGKKELIFKKSRLLHPCIFLCMLLKSL, | (SEQ ID NO:668) |
| and/or | |
| VMIRFYIIYTHTHTPQKLLYNQVVXLLLSFGLLR | (SEQ ID NO:669) |
| EERXNF. | |

encompassed by the invention.

[0248] The gene encoding the disclosed cDNA is believed to reside on chromosome 22. Accordingly, polynucleotides related to this invention are useful as a marker in linkage analysis for chromosome 22. This gene is expressed primarily in T cell lymphoma and monocytes. Therefore, polynucleotides and polypeptides of the invention are useful as reagents for differential identification of the tissue(s) or cell type(s) present in a biological sample and for diagnosis of immune or hematopoietic disorders, particularly T-cell lymphoma. Similarly, polypeptides and antibodies directed to these polypeptides are useful in providing immunological probes for differential identification of the tissue(s) or cell type(s). For a number of disorders of the above tissues or cells, particularly of the immune system, expression of this gene at significantly higher or lower levels may be routinely detected in certain tissues or cell types (e.g., immune, hematopoietic and cancerous and wounded tissues) or bodily fluids (e.g., lymph, serum, plasma, urine, synovial fluid and spinal fluid) or another tissue or cell sample taken from an individual having such a disorder, relative to the standard gene expression level, i.e., the expression level in healthy tissue or bodily fluid from an individual not having the disorder. The tissue distribution in T-cell lymphoma and monocytes indicates that the protein product of this gene is useful for the diagnosis and treatment of proliferative conditions of blood cells, particularly T-cell lymphoma. Moreover, the expression of this gene product indicates a role in regulating the proliferation, survival, differentiation, and/or activation of hematopoietic cell lineages, including blood stem cells. This gene product may be involved in the regulation of cytokine production, antigen presentation, or other processes that may also suggest a usefulness in the treatment of cancer (e.g. by boosting immune responses). Since the gene is expressed in cells of lymphoid origin, the natural gene product may be involved in immune functions. Therefore it may be also used as an agent for immunological disorders including arthritis, asthma, immunodeficiency diseases such as AIDS, leukemia, rheumatoid arthritis, granulomatous disease, inflammatory bowel disease, sepsis, acne, neutropenia, neutrophilia, psoriasis, hypersensitivities, such as T-cell mediated cytotoxicity; immune reactions to transplanted organs and tissues, such as host-versus-graft and graft-versus-host diseases, or autoimmunity disorders, such as autoimmune infertility, lense tissue injury, demyelination, systemic lupus erythematosis, drug induced hemolytic anemia, rheumatoid arthritis, Sjogren's disease, scleroderma and tissues. In addition, this gene product may have commercial utility in the expansion of stem cells and committed progenitors of various blood lineages, and in the differentiation and/or proliferation of various cell types. Protein, as well as, antibodies directed against the protein may show utility as a tumor marker and/or immunotherapy targets for the above listed tissues.

[0249] Many polynucleotide sequences, such as EST sequences, are publicly available and accessible through sequence databases. Some of these sequences are related to SEQ ID NO:87 and may have been publicly available prior to conception of the present invention. Preferably, such related polynucleotides are specifically excluded from the scope of the present invention. To list every related sequence is cumbersome. Accordingly, preferably excluded from the present invention are one or more polynucleotides comprising a nucleotide sequence described by the general formula of a-b, where a is any integer between 1 to 1353 of SEQ ID NO:87, b is an integer of 15 to 1367, where both a and b correspond to the positions of nucleotide residues shown in SEQ ID NO:87, and where b is greater than or equal to a+14.

[0250] Features of Protein Encoded by Gene No: 78

| | |
|---|---|
| ILVDSFKLKL, | (SEQ ID NO:670) |
| LPFFLIHQVLTPLYLMTCTFRTAEYFPFYPCLHC | (SEQ ID NO:671) |
| SITFIQFLYGSSERXDSEDPSLKKQTIKCIHSDQ | |
| SKKRHIPSPLHTEKFGILRSP, | |
| MTCTFRTAEYFPFYPCLHCSITF, | (SEQ ID NO:672) |
| and/or | |
| SDQSKKRHIPSPLHTEKFGIL. | (SEQ ID NO:673) |

Polynucleotides encoding these polypeptides are also encompassed by the invention.

[0251] The gene encoding the disclosed cDNA is believed to reside on chromosome 8. Accordingly, polynucleotides related to this invention are useful as a marker in linkage analysis for chromosome 8. This gene is expressed primarily in tonsils, and a bone marrow cell line. Therefore, polynucleotides and polypeptides of the invention are useful as reagents for differential identification of the tissue(s) or cell type(s) present in a biological sample and for diagnosis of immunological or hematopoietic disorders. Similarly, polypeptides and antibodies directed to these polypeptides are useful in providing immunological probes for differential identification of the tissue(s) or cell type(s). For a number of disorders of the above tissues or cells, particularly of the immune system, expression of this gene at significantly higher or lower levels may be routinely detected in certain tissues or cell types (e.g., immune, hematopoietic, and cancerous and wounded tissues) or bodily fluids (e.g., lymph, serum, plasma, urine, synovial fluid and spinal fluid) or another tissue or cell sample taken from an individual having such a disorder, relative to the standard gene expression level, i.e., the expression level in healthy tissue or bodily fluid from an individual not having the disorder. The tissue distribution in tonsils and bone marrow cell lines indicates that the protein product of this gene is useful for the diagnosis and treatment of immunological disorders. Moreover, the protein product of this gene is useful for the treatment and diagnosis of hematopoietic related disorders such as anemia, pancytopenia, leukopenia, thrombocytopenia or leukemia since stromal cells are important in the production of cells of hematopoietic lineages. The uses include bone marrow cell ex vivo culture, bone marrow transplantation, bone marrow reconstitution, radiotherapy or chemotherapy of neoplasia. The gene product may also be involved in lymphopoiesis, therefore, it can be used in immune disorders such as infection, inflammation, allergy, immunodeficiency etc. In addition, this gene product may have commercial utility in the expansion of stem cells and committed progenitors of various blood lineages, and in the differentiation and/or proliferation of various cell types. Protein, as well as, antibodies directed against the protein may show utility as a tumor marker and/or immunotherapy targets for the above listed tissues.

[0252] Many polynucleotide sequences, such as EST sequences, are publicly available and accessible through sequence databases. Some of these sequences are related to SEQ ID NO:88 and may have been publicly available prior to conception of the present invention. Preferably, such related polynucleotides are specifically excluded from the scope of the present invention. To list every related sequence is cumbersome. Accordingly, preferably excluded from the present invention are one or more polynucleotides comprising a nucleotide sequence described by the general formula of a-b, where a is any integer between 1 to 1074 of SEQ ID NO:88, b is an integer of 15 to 1088, where both a and b correspond to the positions of nucleotide residues shown in SEQ ID NO:88, and where b is greater than or equal to a+14.

Features of Protein Encoded by Gene No: 79

[0253] In specific embodiments, polypeptides of the invention comprise the following amino acid sequence:

| | |
|---|---|
| MGTRAQVTPGRLPIPPPAPGLPFSAXEPLQGQLR | (SEQ ID NO:674) |
| RVSSSRGGFPGLALQLLRSETVKAYVNNEINILA | |
| SFF, | |
| MLVRTRPSQPLPLPGVGLGGPRSGDPPESTELRK | (SEQ ID NO:675) |
| GPGFLA, | |
| RRVSSSRGGFPGLALQLLRSETVKAYVNN, | (SEQ ID NO:676) |
| and/or | |
| YIYLIVYISFYSFRPQQL. | (SEQ ID NO:677) |

invention.

[0254] This gene is expressed primarily in brain, placenta, bone marrow, keratinocyte, fetal liver, and spleen. Therefore, polynucleotides and polypeptides of the invention are useful as reagents for differential identification of the tissue(s) or cell type(s) present in a biological sample and for diagnosis of neural, integumentary, immune, or hematopoietic disorders, particularly neurodegenerative conditions, and skin related diseases. Similarly, polypeptides and antibodies directed to these polypeptides are useful in providing immunological probes for differential identification of the tissue(s) or cell type(s). For a number of disorders of the above tissues or cells, particularly of the immune and skin system, expression of this gene at significantly higher or lower levels may be routinely detected in certain tissues or cell types (e.g., neural, integumentary, immune, hematopoietic, hepatic, developmental, reproductive, and cancerous and wounded tissues) or bodily fluids (e.g., lymph, serum, amniotic fluid, bile, plasma, urine, synovial fluid and spinal fluid) or another tissue or cell sample taken from an individual having such a disorder, relative to the standard gene expression level, i.e., the expression level in healthy tissue or bodily fluid from an individual not having the disorder. The tissue distribution in brain and keratinocytes indicates that the protein product of this gene is useful for the diagnosis and treatment of many neural and skin related diseases. Alternatively, the expression within placenta and fetal tissues indicates that the protein product of this gene may be useful in the treatment, detection, or prevention of a variety of developmental or reproductive disorders. Moreover, the secreted protein can also be used to determine biological activity, to raise antibodies, as tissue markers, to isolate cognate ligands or receptors, to identify agents that modulate their interactions and as nutritional supplements. It may also have a very wide range of biological activities. Typical of these are cytokine, cell proliferation/differentiation modulating activity or induction of other cytokines; immunostimulating/immunosuppressant activities (e.g. for treating human immunodeficiency virus infection, cancer, autoimmune diseases and allergy); regulation of hematopoiesis (e.g. for treating anemia or as adjunct to chemotherapy); stimulation or growth of bone, cartilage, tendons, ligaments and/or nerves (e.g. for treating wounds, stimulation of follicle stimulating hormone (for control of fertility); chemotactic and chemokinetic activities (e.g. for treating infections, tumors); hemostatic or thrombolytic activity (e.g. for treating hemophilia, cardiac infarction etc.); anti-inflammatory activity (e.g. for treating septic shock, Crohn's disease); as antimicrobials; for treating psoriasis or other hyperproliferative diseases; for regulation of metabolism, and behavior. Also contemplated is the use of the corresponding nucleic acid in gene therapy procedures. Protein, as well as, antibodies directed against the protein may show utility as a tumor marker and/or immunotherapy targets for the above listed tissues.

[0255] Many polynucleotide sequences, such as EST sequences, are publicly available and accessible through sequence databases. Some of these sequences are related to SEQ ID NO:89 and may have been publicly available prior to conception of the present invention. Preferably, such related polynucleotides are specifically excluded from the scope of the present invention. To list every related sequence is cumbersome. Accordingly, preferably excluded from the present invention are one or more polynucleotides comprising a nucleotide sequence described by the general formula of a-b, where a is any integer between 1 to 1847 of SEQ ID NO:89, b is an integer of 15 to 1861, where both a and b correspond to the positions of nucleotide residues shown in SEQ ID NO:89, and where b is greater than or equal to a+14.

Features of Protein Encoded by Gene No: 80

[0256] The translation product of this gene shares sequence homology with both the human and mouse RNA Polymerase I which is thought to be important in gene transcription and DNA repair processes (See Genbank Accession No. gi|2266929).

| | |
|---|---|
| LRCQLWLWRRSWCTIIHPLFR, | (SEQ ID NO:678) |
| PQRTVREPQRLIXFQRALSDQCMMISSSLSCGLA | (SEQ ID NO:679) |
| KKLTCSCTVSRALAKIMPSFHQWQQPVTGSCQTS | |
| PCLSPWKGRQLRS, | |
| IMPSFHQWQQPVTGSCQTSPCLSP, | (SEQ ID NO:680) |
| NSARARGEIEDGGFSGGGGNADRVVLGEFGVRNV | (SEQ ID NO:681) |
| HTTDFPGNYSGYDDAWDQDRFEKNFRVDVVHMDE | |
| NSLEFDMVGIDAAIANAFRRILLAEVPTMAVEKV | |
| LVYNNTSIVQDEILAHRLGLIPIHADPRLFEYRN | |
| QGDEEGTEIDTLQFRLQVRCTRNPHAAKDSSDPN | |
| ELYVNHKG, | |
| VLGEFGVRNVHTTDFPGNYSGYDDAWDQDRF, | (SEQ ID NO:682) |
| AEVPTMAVEKVLVYNNTSIVQDEILAHRLGLIPI | (SEQ ID NO:683) |
| HA, | |
| LQFRLQVRCTRNPHAAKDSSDPN, | (SEQ ID NO:684) |
| TMDVLLYTRTFSTAIVGTSASRIRRKALAMAASI | (SEQ ID NO:685) |
| PTMSNSSEFSSMCTTSTRKFFSKRSWSQASS, | |
| TAIVGTSASRIRRKALAMAASIP, | (SEQ ID NO:686) |
| PTMSNSSEFSSMCTTSTRKFFS, | (SEQ ID NO:687) |
| IRHELVERLKMAASQAVEEMRTAWFWGSLGFAMS | (SEQ ID NO:688) |
| ILLTFPVTIPVMMMPGTRTASRRISVWM, | |
| VERLKMAASQAVEEMRTAWFW, | (SEQ ID NO:689) |
| SILLTFPVTIPVMMMPGTRTASRRI, | (SEQ ID NO:690) |
| TTKADLFPEGTIRPVHDDILIAQLRPGQEIDLLM | (SEQ ID NO:691) |
| HCVKGIGKDHAKFSPVATASYRXLPDITLLEPVE | |
| GEAAEELSRCFSXGVIEVQEVQGKKVARVANPRL | |
| DTFSREIFRNEKLKKVVRLARVRDHYIFSVESTG | |
| VLPPDVLVSEAIKVLMGKCRRFLDELDAVQMD, | |
| PEGTIRPVHDDILIAQLRPGQEI, | (SEQ ID NO:692) |
| AKFSPVATASYRXLPDITLLEPV, | (SEQ ID NO:693) |
| KLKKVVRLARVRDHYIFSVE, | (SEQ ID NO:694) |
| and/or | |
| DVLVSEAIKVLMGKCRRFLDELDAV. | (SEQ ID NO:695) |

encoding these polypeptides are also encompassed by the invention.

[0257] This gene is expressed primarily in HEL cell lines and aorta endothelial cells and to a lesser extent in Jurkat T-cells. Therefore, polynucleotides and polypeptides of the invention are useful as reagents for differential identification of the tissue(s) or cell type(s) present in a biological sample and for diagnosis and treatment of vascular, immune, or hematopoietic disorders, particularly cancers and autoimmune diseases. Similarly, polypeptides and antibodies directed to these polypeptides are useful in providing immunological probes for differential identification of the tissue(s) or cell type(s). For a number of disorders of the above tissues or cells, particularly of the immune system, expression of this gene at significantly higher or lower levels may be routinely detected in certain tissues or cell types (e.g., vascular, immune, hematopoietic, and cancerous and wounded tissues) or bodily fluids (e.g., lymph, serum, plasma, urine, synovial fluid and spinal fluid) or another tissue or cell sample taken from an individual having such a disorder, relative to the standard gene expression level, i.e., the expression level in healthy tissue or bodily fluid from an individual not having the disorder. Preferred epitopes include those comprising a sequence shown in SEQ ID NO. 195 as residues: Lys-25 to Arg-32. The tissue distribution in endothelial and T-cells, combined with the strong homology to the human and mouse RNA polymerase I protein indicates that the protein product of this gene is useful for the treatment of immune diseases and cardiovascular diseases, which include, but are not limited to embolism, atherosclerosis, aneurysm, stroke, or microvascular disease. Protein, as well as, antibodies directed against the protein may show utility as a tumor marker and/or immunotherapy targets for the above listed tissues.

[0258] Many polynucleotide sequences, such as EST sequences, are publicly available and accessible through sequence databases. Some of these sequences are related to SEQ ID NO:90 and may have been publicly available prior to conception of the present invention. Preferably, such related polynucleotides are specifically excluded from the scope of the present invention. To list every related sequence is cumbersome. Accordingly, preferably excluded from the present invention are one or more polynucleotides comprising a nucleotide sequence described by the general formula of a-b, where a is any integer between 1 to 1245 of SEQ ID NO:90, b is an integer of 15 to 1259, where both a and b correspond to the positions of nucleotide residues shown in SEQ ID NO:90, and where b is greater than or equal to a+14.

Features of Protein Encoded by Gene No: 81

[0259] The translation product of this gene shares sequence homology with human trichohylin, in addition to, a human DNA-binding protein (See Genbank Accession No. gi|2588783) which are thought to be important in gene regulation. In specific embodiments, polypeptides of the invention comprise the following amino acid sequence:

| | |
|---|---|
| MCPVCGRALSSPGSLGRHLLIHSEDQRSNCAVCGARFTSHATFNSEKLPEVLNMESLPTVHNEGPSSAEGKDIAFSPPVYPAGILL | (SEQ ID NO:696) |
| VCNNCAAYRKXLEAQTPSVXKWALRRQNEPLEVRLQRLERERTAKKSRRDNETPEEREVRRMRDREAKRLQRMQETDEQRARRLQR | |
| DREAMRLKRANETPEKRQARLIREREAKRLKRRLEKMDMMLRAQFGQDPSAMAALAAEMNFFQLPVSGVELDXQLLGKMAFEEQNS | |
| SXLH, | |
| IWNPYPQST, | (SEQ ID NO:697) |
| TLPVSPLPARLRDREQLIAHVYQHTAAVVSAKSY, | (SEQ ID NO:698) |
| SSPGSLGRHLLIHSEDQRSNCA, | (SEQ ID NO:699) |
| FNSEKLPEVLNMESLPTVHNEGPS, | (SEQ ID NO:700) |
| PAGILLVCNNCAAYRKXLEAQTPS, | (SEQ ID NO:701) |
| LEVRLQRLERERTAKKSRRDNE, | (SEQ ID NO:702) |
| EAKRLQRMQETDEQRARRLQRDR, | (SEQ ID NO:703) |
| KRQARLIREREAKRLKRRLEKMD, | (SEQ ID NO:704) |
| PLPARLRDREQLIAHVYQHTAAV, | (SEQ ID NO:705) |
| ARSLLTPSSCSHMQGLLRSTCNKPRPASGSKDRASWVAAALVLVAVGVGGWVGRWEGGQAGGCGSVQXXAVLLFKGHLAQKLXVQLHP | (SEQ ID NO:706) |
| TYRQLEEVHFSC, | |
| PASGSKDRASWVAAALVLVAVGVGGWVGRWE, | (SEQ ID NO:707) |
| ARNIMSIFSSLLLSRLASRSRMSRACRFSGVSLARFSLMASRSRCSRRARCSSVSCMRCKRLASRSLMRLTSRSSGVSLSRRLFLA | (SEQ ID NO:708) |
| VRSRSSRCSRTSKGSFCRRRAHLXTLGVWASSXLR, | |
| and/or | |
| RCKRLASRSLMRLTSRSSGVSLSRRLFLAVR. | (SEQ ID NO:709) |

encompassed by the invention.

[0260] This gene is expressed primarily in brain tissue, and to a lesser extent, in apoptopic T-cell and B-cell lymphoma. Therefore, polynucleotides and polypeptides of the invention are useful as reagents for differential identification of the tissue(s) or cell type(s) present in a biological sample and for diagnosis and treatment of growth disorders, neurodegenerative diseases, immune, hematopoietic, or endocrine disorders. Similarly, polypeptides and antibodies directed to these polypeptides are useful in providing immunological probes for differential identification of the tissue(s) or cell type(s). For a number of disorders of the above tissues or cells, particularly of the neural and immune systems, expression of this gene at significantly higher or lower levels may be routinely detected in certain tissues or cell types (e.g., growth disorders, neurodegenerative diseases, immune, hematopoietic, endocrine, and cancerous and wounded tissues) or bodily fluids (e.g., lymph, serum, plasma, urine, synovial fluid and spinal fluid) or another tissue or cell sample taken from an individual having such a disorder, relative to the standard gene expression level, i.e., the expression level in healthy tissue or bodily fluid from an individual not having the disorder. The tissue distribution in brain, combined with the homology to proteins involved in gene regulation indicates that the protein product of this gene is useful for the diagnosis and treatment of immune and neurological diseases. Moreover, the protein may show utility in the detection, treatment, or prevention of a variety of proliferative disorders, particularly within the above tissues, such as brain or immune system cancers. Protein, as well as, antibodies directed against the protein may show utility as a tumor marker and/or immunotherapy targets for the above listed tissues.

[0261] Many polynucleotide sequences, such as EST sequences, are publicly available and accessible through sequence databases. Some of these sequences are related to SEQ ID NO:91 and may have been publicly available prior to conception of the present invention. Preferably, such related polynucleotides are specifically excluded from the scope of the present invention. To list every related sequence is cumbersome. Accordingly, preferably excluded from the present invention are one or more polynucleotides comprising a nucleotide sequence described by the general formula of a-b, where a is any integer between 1 to 1552 of SEQ ID NO:91, b is an integer of 15 to 1566, where both a and b correspond to the positions of nucleotide residues shown in SEQ ID NO:91, and where b is greater than or equal to a+14.

Features of Protein Encoded by Gene No: 82

[0262] The translation product of this gene was found to have homology to the human high-affinity copper uptake protein, hctr1, (See Genbank Accession No. gi|2315987), which is thought to be important in the regulation of vital cellular processes indirectly, since an overabundance of intracellular copper can lead to toxic conditions within the cell, in addition to altering the function of cellular proteins via copper ion substitution. The ctrl gene was identified in the process of copper uptake, by complementation of the yeast high-affinity copper uptake mutant, ctrl. Besides complementing ctrl growth defect on nonfermentable media, the human gene also rescues iron transport and SOD1 defects in ctrl yeast. Overexpression of the gene in yeast leads to vulnerability to the toxicity of copper overload. In addition, its expression in ctrl yeast significantly increases the level of cellular copper, as demonstrated by atomic absorption. This gene is proposed to be a candidate for high-affinity copper uptake in humans. The hCTR1 and yeast CTR1 predicted transmembrane proteins are 29% identical, but the human protein is substantially smaller in both the extracellular metal-binding and intracellular domains. An additional human gene similar to hCTR1, here named hCTR2, was identified in a database search. Both hCTR1 and hCTR2 are expressed in all human tissues examined, and both genes are located in 9q31/32. These studies, together with the previously recognized functional and sequence similarity between the Menkes/Wilson copper export proteins and CCC2 in yeast, demonstrate that similar copper homeostatic mechanisms are used in these evolutionarily divergent organisms. The hcrt1 gene was found by another group subsequent to our initial filing (See for example, Proc. Natl. Acad. Sci. U.S.A. 94 (14), 7481-7486 (1997)).

[0263] In specific embodiments, polypeptides of the invention comprise the following amino acid sequence:

| | |
|---|---|
| MDHSHHMGMSYMDSNSTMQPSHHHPTTSASHSHGGGDSSMMMMPMTFYFGFKNVELLFSGLVINTAGEMAGAFVAVFLLAMFYEGL | (SEQ ID NO:710) |
| KIARESLLRKSQVSIRYNSMPVPGPNGTILMETHKTVGQQMLSFPHLLQTVLHIIQVVISYFLMLIFMTYNGYLCIAXAAGAGTGY | |
| FLFSWKKAVVVDITEHCH, | |
| GMSYMDSNSTMQPSHHHPITSA, | (SEQ ID NO:711) |
| GDSSMMMMPMTFYFGFKNVELLFSGL, | (SEQ ID NO:712) |
| VFLLAMFYEGLKIARESLLRKSQVSIRYNS, | (SEQ ID NO:713) |
| VPGPNGTILMETHKTVGQQMLSFPHLL, | (SEQ ID NO:714) |
| and/or | |
| FMTYNGYLCIAXAAGAGTGYFLFSWK. | (SEQ ID NO:715) |

Polynucleotides encoding these polypeptides are also encompassed by the invention.

[0264] The gene encoding the disclosed cDNA is believed to reside on chromosome 9. Accordingly, polynucleotides related to this invention are useful as a marker in linkage analysis for chromosome 9. This gene is expressed primarily in osteosarcoma, and to a lesser extent, in T-cell and bone marrow stromal cell. Therefore, polynucleotides and polypeptides of the invention are useful as reagents for differential identification of the tissue(s) or cell type(s) present in a biological sample and for treatment and diagnosis of skeletal, immune, or hematopoietic disorders, particularly osteosarcoma and copper and other metal uptake disorders. Similarly, polypeptides and antibodies directed to these polypeptides are useful in providing immunological probes for differential identification of the tissue(s) or cell type(s). For a number of disorders of the above tissues or cells, particularly of the immune system, expression of this gene at significantly higher or lower levels may be routinely detected in certain tissues or cell types (e.g., skeletal, immune, hematopoietic, and cancerous and wounded tissues) or bodily fluids (e.g., lymph, serum, plasma, urine, synovial fluid and spinal fluid) or another tissue or cell sample taken from an individual having such a disorder, relative to the standard gene expression level, i.e., the expression level in healthy tissue or bodily fluid from an individual not having the disorder. Preferred epitopes include those comprising a sequence shown in SEQ ID NO. 197 as residues: Ser-24 to Ser-29. The tissue distribution in osteosarcoma indicates that the protein product of this gene is useful for the prevention or treatment of osteosarcoma and copper or other metal uptake disorders. Alternatively, the expression within T-cell and bone marrow stromal cells indicates the protein product of this gene is useful for the treatment and diagnosis of hematopoietic related disorders such as anemia, pancytopenia, leukopenia, thrombocytopenia or leukemia since stromal cells are important in the production of cells of hematopoietic lineages. The uses include bone marrow cell ex vivo culture, bone marrow transplantation, bone marrow reconstitution, radiotherapy or chemotherapy of neoplasia. The gene product may also be involved in lymphopoiesis, therefore, it can be used in immune disorders such as infection, inflammation, allergy, immunodeficiency etc. In addition, this gene product may have commercial utility in the expansion of stem cells and committed progenitors of various blood lineages, and in the differentiation and/or proliferation of various cell types. Moreover, the overexpression or repression of this protein may show utility in the amelioration of cancer through the resulting changes in gene expression of important nuclear or cytoplasmic ion-dependent proteins required for normal cellular homeostasis. Protein, as well as, antibodies directed against the protein may show utility as a tumor marker and/or immunotherapy targets for the above listed tissues.

[0265] Many polynucleotide sequences, such as EST sequences, are publicly available and accessible through sequence databases. Some of these sequences are related to SEQ ID NO:92 and may have been publicly available prior to conception of the present invention. Preferably, such related polynucleotides are specifically excluded from the scope of the present invention. To list every related sequence is cumbersome. Accordingly, preferably excluded from the present invention are one or more polynucleotides comprising a nucleotide sequence described by the general formula of a-b, where a is any integer between 1 to 1579 of SEQ ID NO:92, b is an integer of 15 to 1593, where both a and b correspond to the positions of nucleotide residues shown in SEQ ID NO:92, and where b is greater than or equal to a+14.

[0266] Features of Protein Encoded by Gene No: 83

| | |
|---|---|
| ACARAPGLTWRGKXQRVK, | (SEQ ID NO:716) |
| CGTSHQGCXHHGPAQATSWLCLPLPPQAHRSSGVLSGLAFILGQLQVTTSGRGGKRSQDTGQSEGHTPPTVLERGLHVSAPGGPGQ | (SEQ ID NO:717) |
| GGEDWGWGGGWTLQVLGPVVNREAKSLICSEAAAASPLNRHSKHLPAMPLCRRDANSDKGGQDGPQTRHPIFTLCXFPLQVSPGAL | |
| AQAQEGREAMQSDHTGPSALRAWAPRAEFGT, | |
| LSGLAFILGQLQVTTSGRGGKRSQDTGQ, | (SEQ ID NO:718) |
| CSEAAAASPLNRHSKHLPAMPLCRRDAN, | (SEQ ID NO:719) |
| and/or | |
| PGALAQAQEGREAMQSDHTGPSALRA. | (SEQ ID NO:720) |

Polynucleotides encoding these polypeptides are also encompassed by the invention.

[0267] This gene is expressed primarily in skin tumor, and to a lesser extent, in apoptotic T-cells. Therefore, polynucleotides and polypeptides of the invention are useful as reagents for differential identification of the tissue(s) or cell type(s) present in a biological sample and for diagnosis of diseases and conditions which include, but are not limited to, integumentary, immune, or hematopoietic disorders, particularly proliferative skin disorders, such as tumors. Similarly, polypeptides and antibodies directed to these polypeptides are useful in providing immunological probes for differential identification of the tissue(s) or cell type(s). For a number of disorders of the above tissues or cells, particularly of the skin, expression of this gene at significantly higher or lower levels may be routinely detected in certain tissues or cell types (e.g., integumentary, immune, hematopoietic, and cancerous and wounded tissues) or bodily fluids (e.g., lymph, serum, plasma, urine, synovial fluid and spinal fluid) or another tissue or cell sample taken from an individual having such a disorder, relative to the standard gene expression level, i.e., the expression level in healthy tissue or bodily fluid from an individual not having the disorder. Preferred epitopes include those comprising a sequence shown in SEQ ID NO. 198 as residues: Leu-51 to Gly-77, Ile-117 to Pro-125. The tissue distribution in skin and T-cells indicates that polynucleotides and polypeptides corresponding to this gene are useful for diagnosis the treatment of skin tumors. Similarly, the protein product of this gene is useful for the treatment, diagnosis, and/or prevention of various skin disorders including congenital disorders (i.e. nevi, moles, freckles, Mongolian spots, hemangiomas, port-wine syndrome), integumentary tumors (i.e. keratoses, Bowen's disease, basal cell carcinoma, squamous cell carcinoma, malignant melanoma, Paget's disease, mycosis fungoides, and Kaposi's sarcoma), injuries and inflammation of the skin (i.e. wounds, rashes, prickly heat disorder, psoriasis, dermatitis), atherosclerosis, uticaria, eczema, photosensitivity, autoimmune disorders (i.e. lupus erythematosus, vitiligo, dermatomyositis, morphea, scleroderma, pemphigoid, and pemphigus), keloids, striae, erythema, petechiae, purpura, and xanthelasma. In addition, such disorders may predispose increased susceptibility to viral and bacterial infections of the skin (i.e. cold sores, warts, chickenpox, molluscum contagiosum, herpes zoster, boils, cellulitis, erysipelas, impetigo, tinea, althletes foot, and ringworm). Moreover, the protein product of this gene may also be useful for the treatment or diagnosis of various connective tissue disorders such as arthritis, trauma, tendonitis, chrondomalacia and inflammation, autoimmune disorders such as rheumatoid arthritis, lupus, scleroderma, and dermatomyositis as well as dwarfism, spinal deformation, and specific joint abnormalities as well as chondrodysplasias (i.e. spondyloepiphyseal dysplasia congenita, familial osteoarthritis, Atelosteogenesis type II, metaphyseal chondrodysplasia type Schmid). The protein may also show utility in the treatment, detection, prevention, and/or amelioration of immune-directed responses to aberrant cellular skin conditions. Protein, as well as, antibodies directed against the protein may show utility as a tumor marker and/or immunotherapy targets for the above listed tissues.

[0268] Many polynucleotide sequences, such as EST sequences, are publicly available and accessible through sequence databases. Some of these sequences are related to SEQ ID NO:93 and may have been publicly available prior to conception of the present invention. Preferably, such related polynucleotides are specifically excluded from the scope of the present invention. To list every related sequence is cumbersome. Accordingly, preferably excluded from the present invention are one or more polynucleotides comprising a nucleotide sequence described by the general formula of a-b, where a is any integer between 1 to 956 of SEQ ID NO:93, b is an integer of 15 to 970, where both a and b correspond to the positions of nucleotide residues shown in SEQ ID NO:93, and where b is greater than or equal to a+14.

Features of Protein Encoded by Gene No: 84

[0269] In specific embodiments, polypeptides of the invention comprise the following amino acid sequence: GVSGEFHDEHLDLA (SEQ ID NO:721). Polynucleotides encoding these polypeptides are also encompassed by the invention.

[0270] This gene is expressed primarily in testis. Therefore, polynucleotides and polypeptides of the invention are useful as reagents for differential identification of the tissue(s) or cell type(s) present in a biological sample and for diagnosis of diseases and conditions which include, but are not limited to, reproductive, and/or endocrine disorders, particularly infertility. Similarly, polypeptides and antibodies directed to these polypeptides are useful in providing immunological probes for differential identification of the tissue(s) or cell type(s). For a number of disorders of the above tissues or cells, particularly of the reproductive system, expression of this gene at significantly higher or lower levels may be routinely detected in certain tissues or cell types (e.g., reproductive, endocrine, and cancerous and wounded tissues) or bodily fluids (e.g., lymph, serum, seminal fluid, plasma, urine, synovial fluid and spinal fluid) or another tissue or cell sample taken from an individual having such a disorder, relative to the standard gene expression level, i.e., the expression level in healthy tissue or bodily fluid from an individual not having the disorder. The tissue distribution in testes indicates that polynucleotides and polypeptides corresponding to this gene are useful for the treatment of reproductive and endocrine diseases and disorders. Expression of this gene product in the testis may implicate this gene product in normal testicular function. In addition, this gene product may be useful in the treatment of male infertility, and/or could be used as a male contraceptive. Protein, as well as, antibodies directed against the protein may show utility as a tumor marker and/or immunotherapy targets for the above listed tissues.

[0271] Many polynucleotide sequences, such as EST sequences, are publicly available and accessible through sequence databases. Some of these sequences are related to SEQ ID NO:94 and may have been publicly available prior to conception of the present invention. Preferably, such related polynucleotides are specifically excluded from the scope of the present invention. To list every related sequence is cumbersome. Accordingly, preferably excluded from the present invention are one or more polynucleotides comprising a nucleotide sequence described by the general formula of a-b, where a is any integer between 1 to 920 of SEQ ID NO:94, b is an integer of 15 to 934, where both a and b correspond to the positions of nucleotide residues shown in SEQ ID NO:94, and where b is greater than or equal to a+14.

Features of Protein Encoded by Gene No: 85

[0272] In specific embodiments, polypeptides of the invention comprise the following amino acid sequence:

| | |
|---|---|
| MVQPCGACAKTXWKACSSCCSSPCCLQERWPXPXAXCPEXGPSSHPGIQALCAVAVVYLSPSSRLDWSLAPLFVPSLAAGETPLTQ | (SEQ ID NO:722) |
| PAWALTTNTLGHGQPAQDRLPALGHCAPISVLGLGSS, | |
| KCVLCGGVQVAGLXPPAAPGAAGLPLHPPXPGEQSKWLVIVMTV, | (SEQ ID NO:723) |
| QKEISTSWWHCYTAAACTRT, | (SEQ ID NO:724) |
| APCRWLKMCPLWRSTGGWPXSSCCSWSCWSASSPSXAWRTEQVAGDRDDSHESPGSRPELGLHGPGGSHGRGPQ, | (SEQ ID NO:725) |
| SSPSXAWRTEQVAGDRDDSHESPGSRPE, | (SEQ ID NO:726) |
| XGPSSHPGIQALCAVAVVYLSPSSR, | (SEQ ID NO:727) |
| and/or | |
| PLTQPAWALTTNTLGHGQPAQDRLPALGH. | (SEQ ID NO:728) |

invention.

[0273] This gene is expressed primarily in kidney cortex, frontal cortex, spinal cord and hippocampus. Therefore, polynucleotides and polypeptides of the invention are useful as reagents for differential identification of the tissue(s) or cell type(s) present in a biological sample and for diagnosis of diseases and conditions which include, but are not limited to, renal, urogenital, or neural disorders, particularly kidney fibrosis, schizophrenia and neurodegenerative disorders. Similarly, polypeptides and antibodies directed to these polypeptides are useful in providing immunological probes for differential identification of the tissue(s) or cell type(s). For a number of disorders of the above tissues or cells, particularly of the neural system, expression of this gene at significantly higher or lower levels may be routinely detected in certain tissues or cell types (e.g., renal, urogenital, neural, and cancerous and wounded tissues) or bodily fluids (e.g., lymph, serum, plasma, urine, synovial fluid and spinal fluid) or another tissue or cell sample taken from an individual having such a disorder, relative to the standard gene expression level, i.e., the expression level in healthy tissue or bodily fluid from an individual not having the disorder. Preferred epitopes include those comprising a sequence shown in SEQ ID NO. 200 as residues: Cys-27 to Tyr-33, Thr-38 to Gly-43, Leu-125 to Gly-130. The tissue distribution in kidney cortex indicates that polynucleotides and polypeptides corresponding to this gene are useful for the treatment of kidney diseases. Similarly, this gene or gene product could be used in the treatment and/or detection of renal failure, nephritus, renal tubular acidosis, proteinuria, pyuria, edema, pyelonephritis, hydronephritis, nephrotic syndrome, crush syndrome, glomerulonephritis, hematuria, renal colic and kidney stones, in addition to Wilm's Tumor Disease, and congenital kidney abnormalities such as horseshoe kidney, polycystic kidney, and Falconi's syndrome. Moreover, the expression within various brain tissues strongly indicates that the protein product of this gene is useful for the detection/treatment of neurodegenerative disease states, behavioral disorders, or inflammatory conditions which include, but are not limited to Alzheimer's Disease, Parkinson's Disease, Huntington's Disease, Tourette Syndrome, meningitis, encephalitis, demyelinating diseases, peripheral neuropathies, neoplasia, trauma, congenital malformations, spinal cord injuries, ischemia and infarction, aneurysms, hemorrhages, schizophrenia, mania, dementia, paranoia, obsessive compulsive disorder, depression, panic disorder, learning disabilities, ALS, psychoses, autism, and altered behaviors, including disorders in feeding, sleep patterns, balance, and perception. In addition, elevated expression of this gene product in regions of the brain indicates that it plays a role in normal neural function. Potentially, this gene product is involved in synapse formation, neurotransmission, learning, cognition, homeostasis, or neuronal differentiation or survival. Protein, as well as, antibodies directed against the protein may show utility as a tumor marker and/or immunotherapy targets for the above listed tissues.

[0274] Many polynucleotide sequences, such as EST sequences, are publicly available and accessible through sequence databases. Some of these sequences are related to SEQ ID NO:95 and may have been publicly available prior to conception of the present invention. Preferably, such related polynucleotides are specifically excluded from the scope of the present invention. To list every related sequence is cumbersome. Accordingly, preferably excluded from the present invention are one or more polynucleotides comprising a nucleotide sequence described by the general formula of a-b, where a is any integer between 1 to 1378 of SEQ ID NO:95, b is an integer of 15 to 1392, where both a and b correspond to the positions of nucleotide residues shown in SEQ ID NO:95, and where b is greater than or equal to a+14.

[0275] Features of Protein Encoded by Gene No: 86

| | |
|---|---|
| SELGQGHCEWAAPN, | (SEQ ID NO:729) |
| LQYGPIPGSTHASGEMQIKTVKCHFHFLDWQRVLCILLTVLNISSKQQMVSKYELRNLREMISLFQPADSFLQPV, | (SEQ ID NO:730) |
| EMQIKTVKCHFHFLDWQRVLCILLTVLNISSKQQ, | (SEQ ID NO:731) |
| HVKVKPMAELPPQHTGXQTGSCCLTFLNGLQPHLPXSVLRTMKLWSSLWTHHTTRRSKAMVTHPRVGPEENKALVLILTLTLSQDF | (SEQ ID NO:732) |
| DTEPKS, | |
| LWTHHTTRRSKAMVTHPRVGPEENKALV, | (SEQ ID NO:733) |
| IKVFTGDAHVSSSLCLYPTFIPTVLMVALSISPFSIPRYLPRNKPKSYYMLWHAXMMSSDEQPKPQGRDAFVKQDLWNITCESKAH | (SEQ ID NO:734) |
| GRTPSSAHGXADRKLLPHLPQWXTATSPQVSLKDNETLVFXVDTPHYQALQSHGDPPSGGS, | (SEQ ID NO:735) |
| FIPTVLMVALSISPFSIPRYLPRNKP, | |
| PKPQGRDAFVKQDLWNITCESKAH, | (SEQ ID NO:736) |
| and/or | |
| QVSLKDNETLVFXVDTPHYQALQSHG. | (SEQ ID NO:737) |

invention.

[0276] This gene is expressed primarily in resting T-cell. Therefore, polynucleotides and polypeptides of the invention are useful as reagents for differential identification of the tissue(s) or cell type(s) present in a biological sample and for diagnosis of diseases and conditions which include, but are not limited to, immune or hematopoietic disorders, particularly inflammatory or immunodeficiency conditions. Similarly, polypeptides and antibodies directed to these polypeptides are useful in providing immunological probes for differential identification of the tissue(s) or cell type(s). For a number of disorders of the above tissues or cells, particularly of the immune system, expression of this gene at significantly higher or lower levels may be routinely detected in certain tissues or cell types (e.g., immune, hematopoietic, and cancerous and wounded tissues) or bodily fluids (e.g., lymph, serum, plasma, urine, synovial fluid and spinal fluid) or another tissue or cell sample taken from an individual having such a disorder, relative to the standard gene expression level, i.e., the expression level in healthy tissue or bodily fluid from an individual not having the disorder. Preferred epitopes include those comprising a sequence shown in SEQ ID NO. 201 as residues: Thr-54 to Ile-59. The tissue distribution in T-cells indicates that polynucleotides and polypeptides corresponding to this gene are useful for the treatment of immune diseases. Moreover, expression of this gene product indicates a role in regulating the proliferation; survival; differentiation; and/or activation of hematopoietic cell lineages, including blood stem cells. This gene product may be involved in the regulation of cytokine production, antigen presentation, or other processes that may also suggest a usefulness in the treatment of cancer (e.g. by boosting immune responses). Since the gene is expressed in cells of lymphoid origin, the natural gene product may be involved in immune functions. Therefore it may be also used as an agent for immunological disorders including arthritis, asthma, immunodeficiency diseases such as AIDS, leukemia, rheumatoid arthritis, granulomatous disease, inflammatory bowel disease, sepsis, acne, neutropenia, neutrophilia, psoriasis, hypersensitivities, such as T-cell mediated cytotoxicity; immune reactions to transplanted organs and tissues, such as host-versus-graft and graft-versus-host diseases, or autoimmunity disorders, such as autoimmune infertility, lense tissue injury, demyelination, systemic lupus erythematosis, drug induced hemolytic anemia, rheumatoid arthritis, Sjogren's disease, scleroderma and tissues. In addition, this gene product may have commercial utility in the expansion of stem cells and committed progenitors of various blood lineages, and in the differentiation and/or proliferation of various cell types. Protein, as well as, antibodies directed against the protein may show utility as a tumor marker and/or immunotherapy targets for the above listed tissues.

[0277] Many polynucleotide sequences, such as EST sequences, are publicly available and accessible through sequence databases. Some of these sequences are related to SEQ ID NO:96 and may have been publicly available prior to conception of the present invention. Preferably, such related polynucleotides are specifically excluded from the scope of the present invention. To list every related sequence is cumbersome. Accordingly, preferably excluded from the present invention are one or more polynucleotides comprising a nucleotide sequence described by the general formula of a-b, where a is any integer between 1 to 1949 of SEQ ID NO:96, b is an integer of 15 to 1963, where both a and b correspond to the positions of nucleotide residues shown in SEQ ID NO:96, and where b is greater than or equal to a+14.

TABLE 1

| | | | | | | | | | 5′ NT | | | | First | |
|---|---|---|---|---|---|---|---|---|---|---|---|---|---|---|
| | | | | | | | | | of First AA | | First | Last | AA of | |
| Gene | cDNA | ATCC ™ Deposit | | NT SEQ | Total NT | 5′ NT of | 3′ NT of | 5′ NT of | of Signal | AA SEQ | AA of | AA of | Secreted | Last AA |
| No. | Clone ID | No: Z and Date | Vector | ID NO: X | Seq. | Clone Seq. | Clone Seq. | Start Codon | Pep | ID NO: Y | Sig Pep | Sig Pep | Portion | of ORF |
| 1 | HOAAE80 | 209012 Apr. 28, 1997 | Uni-ZAP XR | 11 | 1387 | 430 | 1387 | 340 | 340 | 116 | 1 | 30 | 31 | 165 |
| | | 209089 Jun. 05, 1997 | | | | | | | | | | | | |
| 1 | HOAAE80 | 209012 Apr. 28, 1997 | Uni-ZAP XR | 97 | 1220 | 264 | 1220 | 288 | 288 | 202 | 1 | 26 | 27 | 31 |
| | | 209089 Jun. 05, 1997 | | | | | | | | | | | | |
| 2 | HODDN92 | 209012 Apr. 28, 1997 | Uni-ZAP XR | 12 | 1939 | 294 | 1939 | | 434 | 117 | 1 | 26 | 27 | 35 |
| | | 209089 Jun. 05, 1997 | | | | | | | | | | | | |
| 3 | HOSBI96 | 209012 Apr. 28, 1997 | Uni-ZAP XR | 13 | 2602 | 672 | 1811 | 690 | 690 | 118 | 1 | 30 | 31 | 219 |
| | | 209089 Jun. 05, 1997 | | | | | | | | | | | | |
| 4 | HOVAI58 | 209012 Apr. 28, 1997 | pSport1 | 14 | 808 | 1 | 808 | 28 | 28 | 119 | 1 | 26 | 27 | 31 |
| | | 209089 Jun. 05, 1997 | | | | | | | | | | | | |
| 5 | HPBDD36 | 209012 Apr. 28, 1997 | pBLUESCRIPT ™ | 15 | 2143 | 1351 | 2095 | 1130 | 1130 | 120 | 1 | 38 | 39 | 95 |
| | | 209089 Jun. 05, 1997 | SK- | | | | | | | | | | | |
| 5 | HPBDD36 | 209012 Apr. 28, 1997 | pBLUESCRIPT ™ | 98 | 864 | 87 | 831 | 147 | 147 | 203 | 1 | 18 | 19 | 26 |
| | | 209089 Jun. 05, 1997 | SK- | | | | | | | | | | | |
| 6 | HPDDC77 | 209012 Apr. 28, 1997 | pBLUESCRIPT ™ | 16 | 2361 | 455 | 1442 | 510 | 510 | 121 | 1 | 29 | 30 | 131 |
| | | 209089 Jun. 05, 1997 | SK- | | | | | | | | | | | |
| 7 | HPEBD85 | 209012 Apr. 28, 1997 | Uni-ZAP XR | 17 | 803 | 1 | 803 | 81 | 81 | 122 | 1 | 20 | 21 | 64 |
| | | 209089 Jun. 05, 1997 | | | | | | | | | | | | |
| 8 | HPFCX38 | 209012 Apr. 28, 1997 | Uni-ZAP XR | 18 | 1794 | 1051 | 1757 | | 578 | 123 | 1 | | | 8 |
| | | 209089 Jun. 05, 1997 | | | | | | | | | | | | |
| 9 | HPFCY51 | 209012 Apr. 28, 1997 | Uni-ZAP XR | 19 | 1037 | 1 | 1037 | 467 | 467 | 124 | 1 | 30 | 31 | 50 |
| | | 209089 Jun. 05, 1997 | | | | | | | | | | | | |
| 9 | HPFCY51 | 209012 Apr. 28, 1997 | Uni-ZAP XR | 99 | 1052 | 1 | 1052 | 30 | 30 | 204 | 1 | | | 12 |
| | | 209089 Jun. 05, 1997 | | | | | | | | | | | | |
| 10 | HPMGQ80 | 209012 Apr. 28, 1997 | Uni-ZAP XR | 20 | 1273 | 168 | 1266 | 364 | 364 | 125 | 1 | 18 | 19 | 66 |
| | | 209089 Jun. 05, 1997 | | | | | | | | | | | | |
| 10 | HPMGQ80 | 209012 Apr. 28, 1997 | Uni-ZAP XR | 100 | 1309 | 157 | 1309 | 360 | 360 | 205 | 1 | 19 | 20 | 75 |
| | | 209089 Jun. 05, 1997 | | | | | | | | | | | | |
| 11 | HPRTG55 | 209012 Apr. 28, 1997 | pBLUESCRIPT ™ | 21 | 1081 | 55 | 1014 | 237 | 237 | 126 | 1 | 24 | 25 | 26 |
| | | 209089 Jun. 05, 1997 | | | | | | | | | | | | |
| 12 | HROAN56 | 209012 Apr. 28, 1997 | Uni-ZAP XR | 22 | 807 | 1 | 807 | 26 | 26 | 127 | 1 | 19 | 20 | 23 |
| | | 209089 Jun. 05, 1997 | | | | | | | | | | | | |
| 13 | HSABI42 | 209012 Apr. 28, 1997 | pBLUESCRIPT ™ | 23 | 632 | 1 | 596 | 190 | 190 | 128 | 1 | 15 | 16 | 21 |
| | | 209089 Jun. 05, 1997 | SK- | | | | | | | | | | | |
| 14 | HSAUW44 | 209012 Apr. 28, 1997 | Uni-ZAP XR | 24 | 1358 | 1 | 1358 | 372 | 372 | 129 | 1 | 30 | 31 | 54 |
| | | 209089 Jun. 05, 1997 | | | | | | | | | | | | |
| 15 | HSDES04 | 209012 Apr. 28, 1997 | Uni-ZAP XR | 25 | 1376 | 686 | 1376 | 146 | 146 | 130 | 1 | 33 | 34 | 318 |
| | | 209089 Jun. 05, 1997 | | | | | | | | | | | | |
| 15 | HSDES04 | 209089 Jun. 05, 1997 | Uni-ZAP XR | 101 | 929 | 57 | 929 | 291 | 291 | 206 | 1 | 28 | 29 | 60 |
| 16 | HSHBQ68 | 209012 Apr. 28, 1997 | Uni-ZAP XR | 26 | 2923 | 195 | 2642 | 211 | 211 | 131 | 1 | 23 | 24 | 58 |
| | | 209089 Jun. 05, 1997 | | | | | | | | | | | | |
| 17 | HSKBO20 | 209012 Apr. 28, 1997 | Uni-ZAP XR | 27 | 2954 | 337 | 2954 | 456 | 456 | 132 | 1 | 30 | 31 | 305 |
| | | 209089 Jun. 05, 1997 | | | | | | | | | | | | |
| 17 | HSKBO20 | 209012 Apr. 28, 1997 | Uni-ZAP XR | 102 | 775 | 1 | 501 | | 308 | 207 | 1 | 28 | 29 | 98 |
| | | 209089 Jun. 05, 1997 | | | | | | | | | | | | |
| 18 | HSKNM85 | 209012 Apr. 28, 1997 | pBLUESCRIPT ™ | 28 | 534 | 1 | 534 | 122 | 122 | 133 | 1 | 19 | 20 | 28 |
| | | 209089 Jun. 05, 1997 | | | | | | | | | | | | |
| 19 | HSKXJ37 | 209012 Apr. 28, 1997 | pBLUESCRIPT ™ | 29 | 1827 | 67 | 1634 | 311 | 311 | 134 | 1 | 21 | | 21 |
| | | 209089 Jun. 05, 1997 | | | | | | | | | | | | |
| 20 | HSKZE52 | 209012 Apr. 28, 1997 | Uni-ZAP XR | 30 | 1479 | 418 | 1453 | 555 | 555 | 135 | 1 | 18 | 19 | 111 |
| | | 209089 Jun. 05, 1997 | | | | | | | | | | | | |
| 21 | HWTAZ75 | 209012 Apr. 28, 1997 | Uni-ZAP XR | 31 | 987 | 448 | 963 | 133 | 133 | 136 | 1 | 29 | 30 | 114 |
| | | 209089 Jun. 05, 1997 | | | | | | | | | | | | |
| 22 | HSRBA90 | 209012 Apr. 28, 1997 | Uni-ZAP XR | 32 | 2933 | 1437 | 2933 | 1670 | 1670 | 137 | 1 | 19 | 20 | 21 |
| | | 209089 Jun. 05, 1997 | | | | | | | | | | | | |
| 23 | HSVAG05 | 209090 Jun. 05, 1997 | Uni-ZAP XR | 33 | 1366 | 1 | 1366 | 66 | 66 | 138 | 1 | 31 | 32 | 51 |
| 24 | HSVBF78 | 209090 Jun. 05, 1997 | Uni-ZAP XR | 34 | 667 | 141 | 621 | 64 | 64 | 139 | 1 | 28 | 29 | 99 |
| 25 | HSXBO51 | 209090 Jun. 05, 1997 | Uni-ZAP XR | 35 | 1710 | 388 | 1683 | 462 | 462 | 140 | 1 | 26 | 27 | 175 |
| 26 | HT3BE24 | 209090 Jun. 05, 1997 | Uni-ZAP XR | 36 | 1096 | 756 | 1091 | 422 | 422 | 141 | 1 | 15 | 16 | 187 |
| 26 | HT3BE24 | 209090 Jun. 05, 1997 | Uni-ZAP XR | 103 | 359 | 1 | 359 | 41 | 41 | 208 | 1 | 42 | 43 | 70 |
| 27 | HT4AI54 | 209090 Jun. 05, 1997 | Uni-ZAP XR | 37 | 2279 | 1387 | 2279 | 29 | 29 | 142 | 1 | 24 | 25 | 288 |
| 27 | HT4AI54 | 209090 Jun. 05, 1997 | Uni-ZAP XR | 104 | 952 | 1 | 952 | 199 | 199 | 209 | 1 | | | 9 |
| 28 | HTEHU93 | 209090 Jun. 05, 1997 | Uni-ZAP XR | 38 | 745 | 1 | 745 | 187 | 187 | 143 | 1 | 24 | 25 | 113 |
| 29 | HTGCQ82 | 209090 Jun. 05, 1997 | Uni-ZAP XR | 39 | 1718 | 70 | 1718 | 114 | 114 | 144 | 1 | 23 | 24 | 119 |
| 30 | HTLAB25 | 209090 Jun. 05, 1997 | Uni-ZAP XR | 40 | 1966 | 321 | 1966 | 1371 | 1371 | 145 | 1 | 38 | 39 | 78 |
| 31 | HTLAV68 | 209090 Jun. 05, 1997 | Uni-ZAP XR | 41 | 972 | 1 | 972 | 78 | 78 | 146 | 1 | 35 | 36 | 162 |
| 32 | HTLDQ11 | 209090 Jun. 05, 1997 | Uni-ZAP XR | 42 | 1536 | 1 | 1536 | 213 | 213 | 147 | 1 | 36 | 37 | 72 |
| 33 | HTOBX52 | 209090 Jun. 05, 1997 | Uni-ZAP XR | 43 | 2541 | 1743 | 2541 | | 3 | 148 | 1 | 4 | 5 | 123 |
| 34 | HTTCN24 | 209090 Jun. 05, 1997 | Uni-ZAP XR | 44 | 2418 | 918 | 2290 | 188 | 188 | 149 | 1 | 30 | 31 | 138 |
| 34 | HTTCN24 | 209090 Jun. 05, 1997 | Uni-ZAP XR | 105 | 1545 | 123 | 1545 | 345 | 345 | 210 | 1 | 39 | 40 | 49 |
| 35 | HTXCS21 | 209090 Jun. 05, 1997 | Uni-ZAP XR | 45 | 1337 | 657 | 1309 | 76 | 76 | 150 | 1 | 24 | 25 | 356 |
| 35 | HTXCS21 | 209090 Jun. 05, 1997 | Uni-ZAP XR | 106 | 1322 | 641 | 1293 | | 1203 | 211 | 1 | | | 12 |
| 36 | HUFAC49 | 209090 Jun. 05, 1997 | pSport1 | 46 | 1276 | 1 | 1276 | 105 | 105 | 151 | 1 | 17 | 18 | 39 |
| 37 | HAIDK60 | 209090 Jun. 05, 1997 | Uni-ZAP XR | 47 | 1282 | 1 | 1282 | 528 | 528 | 152 | 1 | 30 | 31 | 71 |
| 37 | HAIDK60 | 209090 Jun. 05, 1997 | Uni-ZAP XR | 107 | 276 | 1 | 276 | 14 | 14 | 212 | 1 | 25 | 26 | 37 |
| 38 | HARAG28 | 209090 Jun. 05, 1997 | pBLUESCRIPT ™ | 48 | 645 | 1 | 645 | 150 | 150 | 153 | 1 | 16 | 17 | 33 |
| | | | SK- | | | | | | | | | | | |
| 38 | HARAG28 | 209090 Jun. 05, 1997 | pBLUESCRIPT ™ | 108 | 381 | 1 | 381 | 154 | 154 | 213 | 1 | 18 | 19 | 33 |
| | | | SK- | | | | | | | | | | | |
| 39 | HBMBB80 | 209090 Jun. 05, 1997 | pBLUESCRIPT ™ | 49 | 1495 | 2 | 1495 | 23 | 23 | 154 | 1 | 30 | 31 | 78 |
| 39 | HBMBB80 | 209090 Jun. 05, 1997 | pBLUESCRIPT ™ | 109 | 638 | 1 | 638 | 196 | 196 | 214 | 1 | 16 | 17 | 25 |
| 40 | HCEGR33 | 209090 Jun. 05, 1997 | Uni-ZAP XR | 50 | 1630 | 1 | 1630 | 243 | 243 | 155 | 1 | 22 | 23 | 31 |
| 41 | HSXBP68 | 209090 Jun. 05, 1997 | Uni-ZAP XR | 51 | 2420 | 1009 | 2252 | 79 | 79 | 156 | 1 | 41 | 42 | 464 |
| 41 | HSXBP68 | 209090 Jun. 05, 1997 | Uni-ZAP XR | 110 | 2246 | 835 | 2079 | 985 | 985 | 215 | 1 | 32 | 33 | 104 |
| 42 | HFFAT33 | 209090 Jun. 05, 1997 | Lambda ZAP II | 52 | 1172 | 166 | 802 | 209 | 209 | 157 | 1 | 29 | 30 | 151 |
| 43 | HFGAG96 | 209090 Jun. 05, 1997 | Uni-ZAP XR | 53 | 1589 | 885 | 1446 | 189 | 189 | 158 | 1 | 33 | 34 | 299 |
| 43 | HFGAG96 | 209090 Jun. 05, 1997 | Uni-ZAP XR | 111 | 1105 | 1 | 1105 | | 247 | 216 | 1 | 17 | 18 | 63 |
| 44 | HETFJ05 | 209076 May 22, 1997 | Uni-ZAP XR | 54 | 2074 | 1 | 2065 | 75 | 75 | 159 | 1 | 24 | 25 | 397 |
| 45 | HLTEY63 | 209076 May 22, 1997 | Uni-ZAP XR | 55 | 1483 | 1 | 1280 | 86 | 86 | 160 | 1 | 18 | 19 | 82 |
| 46 | HMSJU68 | 209076 May 22, 1997 | Uni-ZAP XR | 56 | 1123 | 4 | 1123 | 272 | 272 | 161 | 1 | 31 | 32 | 49 |
| 47 | HOSCZ41 | 209076 May 22, 1997 | Uni-ZAP XR | 57 | 1239 | 117 | 1222 | 178 | 178 | 162 | 1 | 20 | 21 | 50 |
| 48 | HSHAV28 | 209076 May 22, 1997 | Uni-ZAP XR | 58 | 803 | 105 | 719 | 100 | 100 | 163 | 1 | 19 | 20 | 194 |
| 49 | HSQEA85 | 209076 May 22, 1997 | Uni-ZAP XR | 59 | 995 | 1 | 995 | 98 | 98 | 164 | 1 | 23 | 24 | 52 |
| 50 | HSTAG52 | 209076 May 22, 1997 | Uni-ZAP XR | 60 | 966 | 114 | 966 | 191 | 191 | 165 | 1 | 45 | 46 | 63 |
| 51 | HBNAJ22 | 209076 May 22, 1997 | Uni-ZAP XR | 61 | 262 | 1 | 262 | 28 | 28 | 166 | 1 | 23 | 24 | 32 |
| 52 | HBXGP76 | 209076 May 22, 1997 | ZAP Express | 62 | 753 | 1 | 753 | 34 | 34 | 167 | 1 | 34 | 35 | 94 |
| 53 | HE6GL64 | 209076 May 22, 1997 | Uni-ZAP XR | 63 | 739 | 1 | 739 | 132 | 132 | 168 | 1 | 32 | 33 | 57 |
| 54 | HESAL35 | 209076 May 22, 1997 | Uni-ZAP XR | 64 | 476 | 1 | 476 | 20 | 20 | 169 | 1 | 27 | 28 | 43 |
| 55 | HETBB70 | 209076 May 22, 1997 | Uni-ZAP XR | 65 | 696 | 1 | 696 | 81 | 81 | 170 | 1 | 25 | 26 | 57 |
| 55 | HETBB70 | 209076 May 22, 1997 | Uni-ZAP XR | 112 | 754 | 14 | 754 | | 263 | 217 | 1 | 17 | 18 | 17 |
| 56 | HLHAY19 | 209076 May 22, 1997 | Uni-ZAP XR | 66 | 1890 | 8 | 1890 | 18 | 18 | 171 | 1 | 22 | 23 | 28 |
| 57 | HLTER45 | 209076 May 22, 1997 | Uni-ZAP XR | 67 | 1614 | 557 | 1614 | 578 | 578 | 172 | 1 | 25 | 26 | 36 |
| 58 | HNHAL34 | 209076 May 22, 1997 | Uni-ZAP XR | 68 | 596 | 1 | 596 | 90 | 90 | 173 | 1 | 18 | 19 | 39 |
| 59 | HOSFF78 | 209076 May 22, 1997 | Uni-ZAP XR | 69 | 1524 | 791 | 1524 | 846 | 846 | 174 | 1 | 34 | 35 | 46 |
| 60 | HSKDV92 | 209076 May 22, 1997 | Uni-ZAP XR | 70 | 819 | 53 | 819 | | 158 | 175 | 1 | 32 | 33 | 33 |
| 61 | HFCCU63 | 209076 May 22, 1997 | Uni-ZAP XR | 71 | 1442 | 1 | 1442 | 1243 | 1243 | 176 | 1 | 16 | 17 | 39 |
| 62 | HLTCS34 | 209076 May 22, 1997 | Uni-ZAP XR | 72 | 1223 | 1 | 1223 | 227 | 227 | 177 | 1 | 17 | 18 | 24 |
| 63 | HPMCC16 | 209086 May 29, 1997 | Uni-ZAP XR | 73 | 1814 | 1024 | 1814 | 85 | 85 | 178 | 1 | 19 | 20 | 262 |
| 64 | HOUCQ17 | 209086 May 29, 1997 | Uni-ZAP XR | 74 | 4712 | 1 | 4693 | 508 | 508 | 179 | 1 | 51 | 52 | 967 |
| 65 | HTDAG66 | 209086 May 29, 1997 | pSport1 | 75 | 1647 | 780 | 1647 | 298 | 298 | 180 | 1 | 31 | 32 | 122 |
| 65 | HTDAG66 | 209086 May 29, 1997 | pSport1 | 113 | 1885 | 262 | 1885 | 369 | 369 | 218 | 1 | | | 17 |
| 66 | HTLBC79 | 209086 May 29, 1997 | Uni-ZAP XR | 76 | 890 | 1 | 890 | 276 | 276 | 181 | 1 | 28 | 29 | 57 |
| 67 | HTOFC34 | 209086 May 29, 1997 | Uni-ZAP XR | 77 | 1657 | 356 | 1645 | 434 | 434 | 182 | 1 | 31 | 32 | 54 |
| 68 | H2CBJ08 | 209086 May 29, 1997 | pBLUESCRIPT ™ | 78 | 2015 | 13 | 2015 | 70 | 70 | 183 | 1 | 17 | 18 | 435 |
| | | | SK- | | | | | | | | | | | |
| 69 | HAGFT48 | 209086 May 29, 1997 | Uni-ZAP XR | 79 | 1213 | 242 | 1213 | | 290 | 184 | 1 | 23 | 24 | 174 |
| 70 | HCE5M29 | 209086 May 29, 1997 | Uni-ZAP XR | 80 | 1391 | 23 | 1353 | 36 | 36 | 185 | 1 | 19 | 20 | 56 |
| 71 | HTPBQ83 | 209076 May 22, 1997 | Uni-ZAP XR | 81 | 1008 | 146 | 1008 | 14 | 14 | 186 | 1 | 15 | 16 | 144 |
| 72 | HCFNN01 | 209086 May 29, 1997 | pSport1 | 82 | 1261 | 154 | 1261 | 254 | 254 | 187 | 1 | 27 | 28 | 43 |
| 73 | HE7TF86 | 209086 May 29, 1997 | Uni-ZAP XR | 83 | 1045 | 241 | 986 | 426 | 426 | 188 | 1 | 23 | 24 | 58 |
| 74 | HGBAC11 | 209086 May 29, 1997 | Uni-ZAP XR | 84 | 2877 | 1 | 2272 | 188 | 188 | 189 | 1 | 25 | 26 | 111 |
| 75 | HHGAU81 | 209086 May 29, 1997 | Lambda ZAP II | 85 | 1367 | 747 | 1367 | 323 | 323 | 190 | 1 | 24 | 25 | 166 |
| 76 | HLCAA05 | 209086 May 29, 1997 | Uni-ZAP XR | 86 | 1010 | 1 | 1010 | 656 | 656 | 191 | 1 | 69 | 70 | 78 |
| 76 | HLCAA05 | 209086 May 29, 1997 | Uni-ZAP XR | 114 | 1009 | 1 | 1009 | 276 | 276 | 219 | 1 | | | 8 |
| 77 | HMSCD68 | 209086 May 29, 1997 | Uni-ZAP XR | 87 | 1367 | 1 | 1367 | 373 | 373 | 192 | 1 | 18 | 19 | 36 |
| 78 | HMWDZ81 | 209086 May 29, 1997 | Uni-Zap XR | 88 | 1088 | 1 | 883 | 214 | 214 | 193 | 1 | 22 | 23 | 30 |
| 79 | HMWGQ73 | 209086 May 29, 1997 | Uni-Zap XR | 89 | 1861 | 1 | 1861 | 789 | 789 | 194 | 1 | 21 | 22 | 34 |
| 80 | HOECN31 | 209086 May 29, 1997 | Uni-ZAP XR | 90 | 1259 | 34 | 1259 | 338 | 338 | 195 | 1 | 28 | 29 | 32 |
| 81 | HPTRF90 | 209086 May 29, 1997 | pBLUESCRIPT ™ | 91 | 1566 | 450 | 1552 | 593 | 593 | 196 | 1 | 28 | 29 | 83 |
| 82 | HSRDH01 | 209086 May 29, 1997 | Uni-ZAP XR | 92 | 1593 | 107 | 1593 | 379 | 379 | 197 | 1 | 22 | 23 | 122 |
| 83 | HSAWD74 | 209126 Jun. 19, 1997 | Uni-ZAP XR | 93 | 970 | 106 | 970 | 142 | 142 | 198 | 1 | 26 | 27 | 142 |
| 83 | HSTBE27 | 209086 May 29, 1997 | Uni-ZAP XR | 115 | 646 | 117 | 646 | 122 | 122 | 220 | 1 | 31 | 32 | 45 |
| 84 | HTEJO12 | 209086 May 29, 1997 | Uni-ZAP XR | 94 | 934 | 1 | 934 | 202 | 202 | 199 | 1 | 20 | 21 | 50 |
| 85 | HTLAB43 | 209086 May 29, 1997 | Uni-ZAP XR | 95 | 1392 | 199 | 1392 | 384 | 384 | 200 | 1 | 17 | 18 | 221 |
| 86 | HTWCT03 | 209086 May 29, 1997 | pSport1 | 96 | 1963 | 1 | 1963 | 334 | 334 | 201 | 1 | 26 | 27 | 101 |

[0278] Table 1 summarizes the information corresponding to each “Gene No.” described above. The nucleotide sequence identified as “NT SEQ ID NO:X” was assembled from partially homologous (“overlapping”) sequences obtained from the “cDNA clone ID” identified in Table I and, in some cases, from additional related DNA clones. The overlapping sequences were assembled into a single contiguous sequence of high redundancy (usually three to five overlapping sequences at each nucleotide position), resulting in a final sequence identified as SEQ ID NO:X.

[0279] The cDNA Clone ID was deposited on the date and given the corresponding deposit number listed in “ATCC™ Deposit No:Z and Date.” Some of the deposits contain multiple different clones corresponding to the same gene. “Vector” refers to the type of vector contained in the cDNA Clone ID.

[0280] “Total NT Seq.” refers to the total number of nucleotides in the contig identified by “Gene No.” The deposited clone may contain all or most of these sequences, reflected by the nucleotide position indicated as “5′ NT of Clone Seq.” and the “3′ NT of Clone Seq.” of SEQ ID NO:X. The nucleotide position of SEQ ID NO:X of the putative start codon (methionine) is identified as “5′ NT of Start Codon.” Similarly, the nucleotide position of SEQ ID NO:X of the predicted signal sequence is identified as “5′ NT of First AA of Signal Pep.”

[0281] The translated amino acid sequence, beginning with the methionine, is identified as “AA SEQ ID NO:Y,” although other reading frames can also be easily translated using known molecular biology techniques. The polypeptides produced by these alternative open reading frames are specifically contemplated by the present invention.

[0282] The first and last amino acid position of SEQ ID NO:Y of the predicted signal peptide is identified as “First AA of Sig Pep” and “Last AA of Sig Pep.” The predicted first amino acid position of SEQ ID NO:Y of the secreted portion is identified as “Predicted First AA of Secreted Portion.” Finally, the amino acid position of SEQ ID NO:Y of the last amino acid in the open reading frame is identified as “Last AA of ORF.”

[0283] SEQ ID NO:X and the translated SEQ ID NO:Y are sufficiently accurate and otherwise suitable for a variety of uses well known in the art and described further below. For instance, SEQ ID NO:X is useful for designing nucleic acid hybridization probes that will detect nucleic acid sequences contained in SEQ ID NO:X or the cDNA contained in the deposited clone. These probes will also hybridize to nucleic acid molecules in biological samples, thereby enabling a variety of forensic and diagnostic methods of the invention. Similarly, polypeptides identified from SEQ ID NO:Y may be used to generate antibodies which bind specifically to the secreted proteins encoded by the cDNA clones identified in Table 1.

[0284] Nevertheless, DNA sequences generated by sequencing reactions can contain sequencing errors. The errors exist as misidentified nucleotides, or as insertions or deletions of nucleotides in the generated DNA sequence. The erroneously inserted or deleted nucleotides cause frame shifts in the reading frames of the predicted amino acid sequence. In these cases, the predicted amino acid sequence diverges from the actual amino acid sequence, even though the generated DNA sequence may be greater than 99.9% identical to the actual DNA sequence (for example, one base insertion or deletion in an open reading frame of over 1000 bases).

[0285] Accordingly, for those applications requiring precision in the nucleotide sequence or the amino acid sequence, the present invention provides not only the generated nucleotide sequence identified as SEQ ID NO:X and the predicted translated amino acid sequence identified as SEQ ID NO:Y, but also a sample of plasmid DNA containing a human cDNA of the invention deposited with the ATCC™, as set forth in Table 1. The nucleotide sequence of each deposited clone can readily be determined by sequencing the deposited clone in accordance with known methods. The predicted amino acid sequence can then be verified from such deposits. Moreover, the amino acid sequence of the protein encoded by a particular clone can also be directly determined by peptide sequencing or by expressing the protein in a suitable host cell containing the deposited human cDNA, collecting the protein, and determining its sequence.

[0286] The present invention also relates to the genes corresponding to SEQ ID NO:X, SEQ ID NO:Y, or the deposited clone. The corresponding gene can be isolated in accordance with known methods using the sequence information disclosed herein. Such methods include preparing probes or primers from the disclosed sequence and identifying or amplifying the corresponding gene from appropriate sources of genomic material.

[0287] Also provided in the present invention are species homologs. Species homologs may be isolated and identified by making suitable probes or primers from the sequences provided herein and screening a suitable nucleic acid source for the desired homologue.

[0288] The polypeptides of the invention can be prepared in any suitable manner. Such polypeptides include isolated naturally occurring polypeptides, recombinantly produced polypeptides, synthetically produced polypeptides, or polypeptides produced by a combination of these methods. Means for preparing such polypeptides are well understood in the art.

[0289] The polypeptides may be in the form of the secreted protein, including the mature form, or may be a part of a larger protein, such as a fusion protein (see below). It is often advantageous to include an additional amino acid sequence which contains secretory or leader sequences, pro-sequences, sequences which aid in purification, such as multiple histidine residues, or an additional sequence for stability during recombinant production.

[0290] The polypeptides of the present invention are preferably provided in an isolated form, and preferably are substantially purified. A recombinantly produced version of a polypeptide, including the secreted polypeptide, can be substantially purified by the one-step method described in Smith and Johnson, Gene 67: 3140 (1988). Polypeptides of the invention also can be purified from natural or recombinant sources using antibodies of the invention raised against the secreted protein in methods which are well known in the art.

Signal Sequences

[0291] Methods for predicting whether a protein has a signal sequence, as well as the cleavage point for that sequence, are available. For instance, the method of McGeoch, Virus Res. 3: 271-286 (1985), uses the information from a short N-terminal charged region and a subsequent uncharged region of the complete (uncleaved) protein. The method of von Heinje, Nucleic Acids Res. 14: 4683-4690 (1986) uses the information from the residues surrounding the cleavage site, typically residues −13 to +2, where +1 indicates the amino terminus of the secreted protein. The accuracy of predicting the cleavage points of known mammalian secretory proteins for each of these methods is in the range of 75-80%. (von Heinje, supra.) However, the two methods do not always produce the same predicted cleavage point(s) for a given protein.

[0292] In the present case, the deduced amino acid sequence of the secreted polypeptide was analyzed by a computer program called SignalP (Henrik Nielsen et al., Protein Engineering 10: 1-6 (1997)), which predicts the cellular location of a protein based on the amino acid sequence. As part of this computational prediction of localization, the methods of McGeoch and von Heinje are incorporated. The analysis of the amino acid sequences of the secreted proteins described herein by this program provided the results shown in Table 1.

[0293] As one of ordinary skill would appreciate, however, cleavage sites sometimes vary from organism to organism and cannot be predicted with absolute certainty. Accordingly, the present invention provides secreted polypeptides having a sequence shown in SEQ ID NO:Y which have an N-terminus beginning within 5 residues (i.e., + or −5 residues) of the predicted cleavage point. Similarly, it is also recognized that in some cases, cleavage of the signal sequence from a secreted protein is not entirely uniform, resulting in more than one secreted species. These polypeptides, and the polynucleotides encoding such polypeptides, are contemplated by the present invention.

[0294] Moreover, the signal sequence identified by the above analysis may not necessarily predict the naturally occurring signal sequence. For example, the naturally occurring signal sequence may be further upstream from the predicted signal sequence. However, it is likely that the predicted signal sequence will be capable of directing the secreted protein to the ER. These polypeptides, and the polynucleotides encoding such polypeptides, are contemplated by the present invention.

Polynucleotide and Polypeptide Variants

[0295] “Variant” refers to a polynucleotide or polypeptide differing from the polynucleotide or polypeptide of the present invention, but retaining essential properties thereof. Generally, variants are overall closely similar, and, in many regions, identical to the polynucleotide or polypeptide of the present invention.

[0296] By a polynucleotide having a nucleotide sequence at least, for example, 95% “identical” to a reference nucleotide sequence of the present invention, it is intended that the nucleotide sequence of the polynucleotide is identical to the reference sequence except that the polynucleotide sequence may include up to five point mutations per each 100 nucleotides of the reference nucleotide sequence encoding the polypeptide. In other words, to obtain a polynucleotide having a nucleotide sequence at least 95% identical to a reference nucleotide sequence, up to 5% of the nucleotides in the reference sequence may be deleted or substituted with another nucleotide, or a number of nucleotides up to 5% of the total nucleotides in the reference sequence may be inserted into the reference sequence. The query sequence may be an entire sequence shown in Table 1, the ORF (open reading frame), or any fragment specified as described herein.

[0297] As a practical matter, whether any particular nucleic acid molecule or polypeptide is at least 90%, 95%, 96%, 97%, 98% or 99% identical to a nucleotide sequence of the presence invention can be determined conventionally using known computer programs. A preferred method for determining the best overall match between a query sequence (a sequence of the present invention) and a subject sequence, also referred to as a global sequence alignment, can be determined using the FASTDB computer program based on the algorithm of Brutlag et al. (Comp. App. Biosci. (1990) 6: 237-245). In a sequence alignment the query and subject sequences are both DNA sequences. An RNA sequence can be compared by converting U's to T's. The result of said global sequence alignment is in percent identity. Preferred parameters used in a FASTDB alignment of DNA sequences to calculate percent identity are: Matrix=Unitary, k-tuple=4, Mismatch Penalty=1, Joining Penalty=30, Randomization Group Length=0, Cutoff Score=1, Gap Penalty=5, Gap Size Penalty 0.05, Window Size=500 or the lenght of the subject nucleotide sequence, whichever is shorter.

[0298] If the subject sequence is shorter than the query sequence because of 5′ or 3′ deletions, not because of internal deletions, a manual correction must be made to the results. This is because the FASTDB program does not account for 5′ and 3′ truncations of the subject sequence when calculating percent identity. For subject sequences truncated at the 5′ or 3′ ends, relative to the query sequence, the percent identity is corrected by calculating the number of bases of the query sequence that are 5′ and 3′ of the subject sequence, which are not matched/aligned, as a percent of the total bases of the query sequence. Whether a nucleotide is matched/aligned is determined by results of the FASTDB sequence alignment. This percentage is then subtracted from the percent identity, calculated by the above FASTDB program using the specified parameters, to arrive at a final percent identity score. This corrected score is what is used for the purposes of the present invention. Only bases outside the 5′ and 3′ bases of the subject sequence, as displayed by the FASTDB alignment, which are not matched/aligned with the query sequence, are calculated for the purposes of manually adjusting the percent identity score.

[0299] For example, a 90 base subject sequence is aligned to a 100 base query sequence to determine percent identity. The deletions occur at the 5′ end of the subject sequence and therefore, the FASTDB alignment does not show a matched/alignment of the first 10 bases at 5′ end. The 10 unpaired bases represent 10% of the sequence (number of bases at the 5′ and 3′ ends not matched/total number of bases in the query sequence) so 10% is subtracted from the percent identity score calculated by the FASTDB program. If the remaining 90 bases were perfectly matched the final percent identity would be 90%. In another example, a 90 base subject sequence is compared with a 100 base query sequence. This time the deletions are internal deletions so that there are no bases on the 5′ or 3′ of the subject sequence which are not matched/aligned with the query. In this case the percent identity calculated by FASTDB is not manually corrected. Once again, only bases 5′ and 3′ of the subject sequence which are not matched/aligned with the query sequence are manually corrected for. No other manual corrections are to made for the purposes of the present invention.

[0300] By a polypeptide having an amino acid sequence at least, for example, 95% “identical” to a query amino acid sequence of the present invention, it is intended that the amino acid sequence of the subject polypeptide is identical to the query sequence except that the subject polypeptide sequence may include up to five amino acid alterations per each 100 amino acids of the query amino acid sequence. In other words, to obtain a polypeptide having an amino acid sequence at least 95% identical to a query amino acid sequence, up to 5% of the amino acid residues in the subject sequence may be inserted, deleted, (indels) or substituted with another amino acid. These alterations of the reference sequence may occur at the amino or carboxy terminal positions of the reference amino acid sequence or anywhere between those terminal positions, interspersed either individually among residues in the reference sequence or in one or more contiguous groups within the reference sequence.

[0301] As a practical matter, whether any particular polypeptide is at least 90%, 95%, 96%, 97%, 98% or 99% identical to, for instance, the amino acid sequences shown in Table 1 or to the amino acid sequence encoded by deposited DNA clone can be determined conventionally using known computer programs. A preferred method for determining the best overall match between a query sequence (a sequence of the present invention) and a subject sequence, also referred to as a global sequence alignment, can be determined using the FASTDB computer program based on the algorithm of Brutlag et al. (Comp. App. Biosci. (1990) 6: 237-245). In a sequence alignment the query and subject sequences are either both nucleotide sequences or both amino acid sequences. The result of said global sequence alignment is in percent identity. Preferred parameters used in a FASTDB amino acid alignment are: Matrix=PAM 0, k-tuple=2, Mismatch Penalty=1, Joining Penalty=20, Randomization Group Length=0, Cutoff Score=1, Window Size=sequence length, Gap Penalty=5, Gap Size Penalty=0.05, Window Size=500 or the length of the subject amino acid sequence, whichever is shorter.

[0302] If the subject sequence is shorter than the query sequence due to N- or C-terminal deletions, not because of internal deletions, a manual correction must be made to the results. This is because the FASTDB program does not account for N- and C-terminal truncations of the subject sequence when calculating global percent identity. For subject sequences truncated at the N- and C-termini, relative to the query sequence, the percent identity is corrected by calculating the number of residues of the query sequence that are N- and C-terminal of the subject sequence, which are not matched/aligned with a corresponding subject residue, as a percent of the total bases of the query sequence. Whether a residue is matched/aligned is determined by results of the FASTDB sequence alignment. This percentage is then subtracted from the percent identity, calculated by the above FASTDB program using the specified parameters, to arrive at a final percent identity score. This final percent identity score is what is used for the purposes of the present invention. Only residues to the N- and C-termini of the subject sequence, which are not matched/aligned with the query sequence, are considered for the purposes of manually adjusting the percent identity score. That is, only query residue positions outside the farthest N- and C-terminal residues of the subject sequence.

[0303] For example, a 90 amino acid residue subject sequence is aligned with a 100 residue query sequence to determine percent identity. The deletion occurs at the N-terminus of the subject sequence and therefore, the FASTDB alignment does not show a matching/alignment of the first 10 residues at the N-terminus. The 10 unpaired residues represent 10% of the sequence (number of residues at the N- and C-termini not matched/total number of residues in the query sequence) so 10% is subtracted from the percent identity score calculated by the FASTDB program. If the remaining 90 residues were perfectly matched the final percent identity would be 90%. In another example, a 90 residue subject sequence is compared with a 100 residue query sequence. This time the deletions are internal deletions so there are no residues at the N- or C-termini of the subject sequence which are not matched/aligned with the query. In this case the percent identity calculated by FASTDB is not manually corrected. Once again, only residue positions outside the N- and C-terminal ends of the subject sequence, as displayed in the FASTDB alignment, which are not matched/aligned with the query sequence are manually corrected for. No other manual corrections are to made for the purposes of the present invention.

[0304] The variants may contain alterations in the coding regions; non-coding regions, or both. Especially preferred are polynucleotide variants containing alterations which produce silent substitutions, additions, or deletions, but do not alter the properties or activities of the encoded polypeptide. Nucleotide variants produced by silent substitutions due to the degeneracy of the genetic code are preferred. Moreover, variants in which 5-10, 1-5, or 1-2 amino acids are substituted, deleted, or added in any combination are also preferred. Polynucleotide variants can be produced for a variety of reasons, e.g., to optimize codon expression for a particular host (change codons in the human mRNA to those preferred by a bacterial host such as E. coli).

[0305] Naturally occurring variants are called “allelic variants,” and refer to one of several alternate forms of a gene occupying a given locus on a chromosome of an organism. (Genes II, Lewin, B., ed., John Wiley & Sons, New York (1985).) These allelic variants can vary at either the polynucleotide and/or polypeptide level. Alternatively, non-naturally occurring variants may be produced by mutagenesis techniques or by direct synthesis.

[0306] Using known methods of protein engineering and recombinant DNA technology, variants may be generated to improve or alter the characteristics of the polypeptides of the present invention. For instance, one or more amino acids can be deleted from the N-terminus or C-terminus of the secreted protein without substantial loss of biological function. The authors of Ron et al., J. Biol. Chem. 268: 2984-2988 (1993), reported variant KGF proteins having heparin binding activity even after deleting 3, 8, or 27 amino-terminal amino acid residues. Similarly, Interferon gamma exhibited up to ten times higher activity after deleting 8-10 amino acid residues from the carboxy terminus of this protein. (Dobeli et al., J. Biotechnology 7: 199-216 (1988).)

[0307] Moreover, ample evidence demonstrates that variants often retain a biological activity similar to that of the naturally occurring protein. For example, Gayle and coworkers (J. Biol. Chem 268: 22105-22111 (1993)) conducted extensive mutational analysis of human cytokine IL-1a. They used random mutagenesis to generate over 3,500 individual IL-1a mutants that averaged 2.5 amino acid changes per variant over the entire length of the molecule. Multiple mutations were examined at every possible amino acid position. The investigators found that “[m]ost of the molecule could be altered with little effect on either [binding or biological activity].” (See, Abstract.) In fact, only 23 unique amino acid sequences, out of more than 3,500 nucleotide sequences examined, produced a protein that significantly differed in activity from wild-type.

[0308] Furthermore, even if deleting one or more amino acids from the N-terminus or C-terminus of a polypeptide results in modification or loss of one or more biological functions, other biological activities may still be retained. For example, the ability of a deletion variant to induce and/or to bind antibodies which recognize the secreted form will likely be retained when less than the majority of the residues of the secreted form are removed from the N-terminus or C-terminus. Whether a particular polypeptide lacking N- or C-terminal residues of a protein retains such immunogenic activities can readily be determined by routine methods described herein and otherwise known in the art.

[0309] Thus, the invention further includes polypeptide variants which show substantial biological activity. Such variants include deletions, insertions, inversions, repeats, and substitutions selected according to general rules known in the art so as have little effect on activity: For example, guidance concerning how to make phenotypically silent amino acid substitutions is provided in Bowie, J. U. et al., Science 247: 1306-1310 (1990), wherein the authors indicate that there are two main strategies for studying the tolerance of an amino acid sequence to change.

[0310] The first strategy exploits the tolerance of amino acid substitutions by natural selection during the process of evolution. By comparing amino acid sequences in different species, conserved amino acids can be identified. These conserved amino acids are likely important for protein function. In contrast, the amino acid positions where substitutions have been tolerated by natural selection indicates that these positions are not critical for protein function. Thus, positions tolerating amino acid substitution could be modified while still maintaining biological activity of the protein.

[0311] The second strategy uses genetic engineering to introduce amino acid changes at specific positions of a cloned gene to identify regions critical for protein function. For example, site directed mutagenesis or alanine-scanning mutagenesis (introduction of single alanine mutations at every residue in the molecule) can be used. (Cunningham and Wells, Science 244: 1081-1085 (1989).) The resulting mutant molecules can then be tested for biological activity.

[0312] As the authors state, these two strategies have revealed that proteins are surprisingly tolerant of amino acid substitutions. The authors further indicate which amino acid changes are likely to be permissive at certain amino acid positions in the protein. For example, most buried (within the tertiary structure of the protein) amino acid residues require nonpolar side chains, whereas few features of surface side chains are generally conserved. Moreover, tolerated conservative amino acid substitutions involve replacement of the aliphatic or hydrophobic amino acids Ala, Val, Leu and lie; replacement of the hydroxyl residues Ser and Thr; replacement of the acidic residues Asp and Glu; replacement of the amide residues Asn and Gln, replacement of the basic residues Lys, Arg, and His; replacement of the aromatic residues Phe, Tyr, and Trp, and replacement of the small-sized amino acids Ala, Ser, Thr, Met, and Gly.

[0313] Besides conservative amino acid substitution, variants of the present invention include (i) substitutions with one or more of the non-conserved amino acid residues, where the substituted amino acid residues may or may not be one encoded by the genetic code, or (ii) substitution with one or more of amino acid residues having a substituent group, or (iii) fusion of the mature polypeptide with another compound, such as a compound to increase the stability and/or solubility of the polypeptide (for example, polyethylene glycol), or (iv) fusion of the polypeptide with additional amino acids, such as an IgG Fe fusion region peptide, or leader or secretory sequence, or a sequence facilitating purification. Such variant polypeptides are deemed to be within the scope of those skilled in the art from the teachings herein.

[0314] For example, polypeptide variants containing amino acid substitutions of charged amino acids with other charged or neutral amino acids may produce proteins with improved characteristics, such as less aggregation. Aggregation of pharmaceutical formulations both reduces activity and increases clearance due to the aggregate's immunogenic activity. (Pinckard et al., Clin. Exp. Immunol. 2: 331-340 (1967); Robbins et al., Diabetes 36: 838-845 (1987); Cleland et al., Crit. Rev. Therapeutic Drug Carrier Systems 10: 307-377 (1993).)

Polynucleotide and Polypeptide Fragments

[0315] In the present invention, a “polynucleotide fragment” refers to a short polynucleotide having a nucleic acid sequence contained in the deposited clone or shown in SEQ ID NO:X. The short nucleotide fragments are preferably at least about 15 nt, and more preferably at least about 20 nt, still more preferably at least about 30 nt, and even more preferably, at least about 40 nt in length. A fragment “at least 20 nt in length,” for example, is intended to include 20 or more contiguous bases from the cDNA sequence contained in the deposited clone or the nucleotide sequence shown in SEQ ID NO:X. These nucleotide fragments are useful as diagnostic probes and primers as discussed herein. Of course, larger fragments (e.g., 50, 150, 500, 600, 2000 nucleotides) are preferred.

[0316] Moreover, representative examples of polynucleotide fragments of the invention, include, for example, fragments having a sequence from about nucleotide number 1-50, 51-100, 101-150, 151-200, 201-250, 251-300, 301-350, 351400, 401450, 451-500, 501-550, 551-600, 651-700, 701-750, 751-800, 800-850, 851-900, 901-950, 951-1000, 1001-1050, 1051-1100, 1101-1150, 1151-1200, 1201-1250, 1251-1300, 1301-1350, 1351-1400, 1401-1450, 1451-1500, 1501-1550, 1551-1600, 1601-1650, 1651-1700, 1701-1750, 1751-1800, 1801-1850, 1851-1900, 1901-1950, 1951-2000, or 2001 to the end of SEQ ID NO:X or the cDNA contained in the deposited clone. In this context “about” includes the particularly recited ranges, larger or smaller by several (5, 4, 3, 2, or 1) nucleotides, at either terminus or at both termini. Preferably, these fragments encode a polypeptide which has biological activity. More preferably, these polynucleotides can be used as probes or primers as discussed herein.

[0317] In the present invention, a “polypeptide fragment” refers to a short amino acid sequence contained in SEQ ID NO:Y or encoded by the cDNA contained in the deposited clone. Protein fragments may be “free-standing,” or comprised within a larger polypeptide of which the fragment forms a part or region, most preferably as a single continuous region. Representative examples of polypeptide fragments of the invention, include, for example, fragments from about amino acid number 1-20, 21-40, 41-60, 61-80, 81-100, 102-120, 121-140, 141-160, or 161 to the end of the coding region. Moreover, polypeptide fragments can be about 20, 30, 40, 50, 60, 70, 80, 90, 100, 110, 120, 130, 140, or 150 amino acids in length. In this context “about” includes the particularly recited ranges, larger or smaller by several (5, 4, 3, 2, or 1) amino acids, at either extreme or at both extremes.

[0318] Preferred polypeptide fragments include the secreted protein as well as the mature form. Further preferred polypeptide fragments include the secreted protein or the mature form having a continuous series of deleted residues from the amino or the carboxy terminus, or both. For example, any number of amino acids, ranging from 1-60, can be deleted from the amino terminus of either the secreted polypeptide or the mature form. Similarly, any number of amino acids, ranging from 1-30, can be deleted from the carboxy terminus of the secreted protein or mature form. Furthermore, any combination of the above amino and carboxy terminus deletions are preferred. Similarly, polynucleotide fragments encoding these polypeptide fragments are also preferred.

[0319] Also preferred are polypeptide and polynucleotide fragments characterized by structural or functional domains, such as fragments that comprise alpha-helix and alpha-helix forming regions, beta-sheet and beta-sheet-forming regions, turn and turn-forming regions, coil and coil-forming regions, hydrophilic regions, hydrophobic regions, alpha amphipathic regions, beta amphipathic regions, flexible regions, surface-forming regions, substrate binding region, and high antigenic index regions. Polypeptide fragments of SEQ ID NO:Y falling within conserved domains are specifically contemplated by the present invention. Moreover, polynucleotide fragments encoding these domains are also contemplated.

[0320] Other preferred fragments are biologically active fragments. Biologically active fragments are those exhibiting activity similar, but not necessarily identical, to an activity of the polypeptide of the present invention. The biological activity of the fragments may include an improved desired activity, or a decreased undesirable activity.

Epitopes & Antibodies

[0321] In the present invention, “epitopes” refer to polypeptide fragments having antigenic or immunogenic activity in an animal, especially in a human. A preferred embodiment of the present invention relates to a polypeptide fragment comprising an epitope, as well as the polynucleotide encoding this fragment. A region of a protein molecule to which an antibody can bind is defined as an “antigenic epitope.” In contrast, an “immunogenic epitope” is defined as a part of a protein that elicits an antibody response. (See, for instance, Geysen et al., Proc. Natl. Acad. Sci. USA 81: 3998-4002 (1983).)

[0322] Fragments which function as epitopes may be produced by any conventional means. (See, e.g., Houghten, R. A., Proc. Natl. Acad. Sci. USA 82: 5131-5135 (1985) further described in U.S. Pat. No. 4,631,211.)

[0323] In the present invention, antigenic epitopes preferably contain a sequence of at least seven, more preferably at least nine, and most preferably between about 15 to about 30 amino acids. Antigenic epitopes are useful to raise antibodies, including monoclonal antibodies, that specifically bind the epitope. (See, for instance, Wilson et al., Cell 37: 767-778 (1984); Sutcliffe, J. G. et al., Science 219: 660-666 (1983).) Similarly, immunogenic epitopes can be used to induce antibodies according to methods well known in the art. (See, for instance, Sutcliffe et al., supra; Wilson et al., supra; Chow, M. et al., Proc. Natl. Acad. Sci. USA 82: 910-914; and Bittle, F. J. et al., J. Gen. Virol. 66: 2347-2354 (1985).) a preferred immunogenic epitope includes the secreted protein. The immunogenic epitopes may be presented together with a carrier protein, such as an albumin, to an animal system (such as rabbit or mouse) or, if it is long enough (at least about 25 amino acids), without a carrier. However, immunogenic epitopes comprising as few as 8 to 10 amino acids have been shown to be sufficient to raise antibodies capable of binding to, at the very least, linear epitopes in a denatured polypeptide (e.g., in Western blotting.)

[0324] As used herein, the term “antibody” (Ab) or “monoclonal antibody” (Mab) is meant to include intact molecules as well as antibody fragments (such as, for example, Fab and F(ab′)2 fragments) which are capable of specifically binding to protein. Fab and F(ab′)2 fragments lack the Fc fragment of intact antibody, clear more rapidly from the circulation, and may have less non-specific tissue binding than an intact antibody. (Wahl et al., J. Nucl. Med. 24: 316-325 (1983).) Thus, these fragments are preferred, as well as the products of a FAB or other immunoglobulin expression library. Moreover, antibodies of the present invention include chimeric, single chain, and humanized antibodies.

Fusion Proteins

[0325] Any polypeptide of the present invention can be used to generate fusion proteins. For example, the polypeptide of the present invention, when fused to a second protein, can be used as an antigenic tag. Antibodies raised against the polypeptide of the present invention can be used to indirectly detect the second protein by binding to the polypeptide. Moreover, because secreted proteins target cellular locations based on trafficking signals, the polypeptides of the present invention can be used as targeting molecules once fused to other proteins.

[0326] Examples of domains that can be fused to polypeptides of the present invention include not only heterologous signal sequences, but also other heterologous functional regions. The fusion does not necessarily need to be direct, but may occur through linker sequences.

[0327] Moreover, fusion proteins may also be engineered to improve characteristics of the polypeptide of the present invention. For instance, a region of additional amino acids, particularly charged amino acids, may be added to the N-terminus of the polypeptide to improve stability and persistence during purification from the host cell or subsequent handling and storage. Also, peptide moieties may be added to the polypeptide to facilitate purification. Such regions may be removed prior to final preparation of the polypeptide. The addition of peptide moieties to facilitate handling of polypeptides are familiar and routine techniques in the art.

[0328] Moreover, polypeptides of the present invention, including fragments, and specifically epitopes, can be combined with parts of the constant domain of immunoglobulins (IgG), resulting in chimeric polypeptides. These fusion proteins facilitate purification and show an increased half-life in vivo. One reported example describes chimeric proteins consisting of the first two domains of the human CD4-polypeptide and various domains of the constant regions of the heavy or light chains of mammalian immunoglobulins. (EP a 394,827; Traunecker et al., Nature 331: 84-86 (1988).) Fusion proteins having disulfide-linked dimeric structures (due to the IgG) can also be more efficient in binding and neutralizing other molecules, than the monomeric secreted protein or protein fragment alone. (Fountoulakis et al., J. Biochem. 270: 3958-3964 (1995).)

[0329] Similarly, EP-A-O 464 533 (Canadian counterpart 2045869) discloses fusion proteins comprising various portions of constant region of immunoglobulin molecules together with another human protein or part thereof. In many cases, the Fc part in a fusion protein is beneficial in therapy and diagnosis, and thus can result in, for example, improved pharmacokinetic properties. (EP-A 0232 262.) Alternatively, deleting the Fc part after the fusion protein has been expressed, detected, and purified, would be desired. For example, the Fc portion may hinder therapy and diagnosis if the fusion protein is used as an antigen for immunizations. In drug discovery, for example, human proteins, such as hIL-5, have been fused with Fc portions for the purpose of high-throughput screening assays to identify antagonists of hIL-5. (See, D. Bennett et al., J. Molecular Recognition 8: 52-58 (1995); K. Johanson et al., J. Biol. Chem. 270: 9459-9471 (1995).)

[0330] Moreover, the polypeptides of the present invention can be fused to marker sequences, such as a peptide which facilitates purification of the fused polypeptide. In preferred embodiments, the marker amino acid sequence is a hexa-histidine peptide, such as the tag provided in a pQE vector (QIAGEN, Inc., 9259 Eton Avenue, Chatsworth, Calif., 91311), among others, many of which are commercially available. As described in Gentz et al., Proc. Natl. Acad. Sci. USA 86: 821-824 (1989), for instance, hexa-histidine provides for convenient purification of the fusion protein. Another peptide tag useful for purification, the “HA” tag, corresponds to an epitope derived from the influenza hemagglutinin protein. (Wilson et al., Cell 37: 767 (1984).)

[0331] Thus, any of these above fusions can be engineered using the polynucleotides or the polypeptides of the present invention.

Vectors, Host Cells, and Protein Production

[0332] The present invention also relates to vectors containing the polynucleotide of the present invention, host cells, and the production of polypeptides by recombinant techniques. The vector may be, for example, a phage, plasmid, viral, or retroviral vector. Retroviral vectors may be replication competent or replication defective. In the latter case, viral propagation generally will occur only in complementing host cells.

[0333] The polynucleotides may be joined to a vector containing a selectable marker for propagation in a host. Generally, a plasmid vector is introduced in a precipitate, such as a calcium phosphate precipitate, or in a complex with a charged lipid. If the vector is a virus, it may be packaged in vitro using an appropriate packaging cell line and then transduced into host cells.

[0334] The polynucleotide insert should be operatively linked to an appropriate promoter, such as the phage lambda PL promoter, the E. coli lac, trp, phoA and tac promoters, the SV40 early and late promoters and promoters of retroviral LTRs, to name a few. Other suitable promoters will be known to the skilled artisan. The expression constructs will further contain sites for transcription initiation, termination, and, in the transcribed region, a ribosome binding site for translation. The coding portion of the transcripts expressed by the constructs will preferably include a translation initiating codon at the beginning and a termination codon (UAA, UGA or UAG) appropriately positioned at the end of the polypeptide to be translated.

[0335] As indicated, the expression vectors will preferably include at least one selectable marker. Such markers include dihydrofolate reductase, G418 or neomycin resistance for eukaryotic cell culture and tetracycline, kanamycin or ampicillin resistance genes for culturing in E. coli and other bacteria. Representative examples of appropriate hosts include, but are not limited to, bacterial cells, such as E. coli, Streptomyces and Salmonella typhimurium cells; fungal cells, such as yeast cells; insect cells such as Drosophila S2 and Spodoptera Sf9 cells; animal cells such as CHO, COS, 293, and Bowes melanoma cells; and plant cells. Appropriate culture mediums and conditions for the above-described host cells are known in the art.

[0336] Among vectors preferred for use in bacteria include pQE70, pQE60 and pQE-9, available from QIAGEN, Inc.; pBLUESCRIPT™ vectors, Phagescript vectors, pNH8A, pNH16a, pNH18a, pNH46A, available from Stratagene Cloning Systems, Inc.; and ptrc99a, pKK223-3, pKK233-3, pDR540, pRIT5 available from Pharmacia Biotech, Inc. Among preferred eukaryotic vectors are pWLNEO, pSV2CAT, pOG44, pXT1 and pSG available from STRATAGENE™; and pSVK3, pBPV, pMSG and pSVL available from PHARMACIA™. Other suitable vectors will be readily apparent to the skilled artisan.

[0337] Introduction of the construct into the host cell can be effected by calcium phosphate transfection, DEAE-dextran mediated transfection, cationic lipid-mediated transfection, electroporation, transduction, infection, or other methods. Such methods are described in many standard laboratory manuals, such as Davis et al., Basic Methods In Molecular Biology (1986). It is specifically contemplated that the polypeptides of the present invention may in fact be expressed by a host cell lacking a recombinant vector.

[0338] A polypeptide of this invention can be recovered and purified from recombinant cell cultures by well-known methods including ammonium sulfate or ethanol precipitation, acid extraction, anion or cation exchange chromatography, phosphocellulose chromatography, hydrophobic interaction chromatography, affinity chromatography, hydroxylapatite chromatography and lectin chromatography. Most preferably, high performance liquid chromatography (“HPLC”) is employed for purification.

[0339] Polypeptides of the present invention, and preferably the secreted form, can also be recovered from: products purified from natural sources, including bodily fluids, tissues and cells, whether directly isolated or cultured; products of chemical synthetic procedures; and products produced by recombinant techniques from a prokaryotic or eukaryotic host, including, for example, bacterial, yeast, higher plant, insect, and mammalian cells. Depending upon the host employed in a recombinant production procedure, the polypeptides of the present invention may be glycosylated or may be non-glycosylated. In addition, polypeptides of the invention may also include an initial modified methionine residue, in some cases as a result of host-mediated processes. Thus, it is well known in the art that the N-terminal methionine encoded by the translation initiation codon generally is removed with high efficiency from any protein after translation in all eukaryotic cells. While the N-terminal methionine on most proteins also is efficiently removed in most prokaryotes, for some proteins, this prokaryotic removal process is inefficient, depending on the nature of the amino acid to which the N-terminal methionine is covalently linked.

Uses of the Polynucleotides

[0340] Each of the polynucleotides identified herein can be used in numerous ways as reagents. The following description should be considered exemplary and utilizes known techniques.

[0341] The polynucleotides of the present invention are useful for chromosome identification. There exists an ongoing need to identify new chromosome markers, since few chromosome marking reagents, based on actual sequence data (repeat polymorphisms), are presently available. Each polynucleotide of the present invention can be used as a chromosome marker.

[0342] Briefly, sequences can be mapped to chromosomes by preparing PCR primers (preferably 15-25 bp) from the sequences shown in SEQ ID NO:X. Primers can be selected using computer analysis so that primers do not span more than one predicted exon in the genomic DNA. These primers are then used for PCR screening of somatic cell hybrids containing individual human chromosomes. Only those hybrids containing the human gene corresponding to the SEQ ID NO:X will yield an amplified fragment.

[0343] Similarly, somatic hybrids provide a rapid method of PCR mapping the polynucleotides to particular chromosomes. Three or more clones can be assigned per day using a single thermal cycler. Moreover, sublocalization of the polynucleotides can be achieved with panels of specific chromosome fragments. Other gene mapping strategies that can be used include in situ hybridization, prescreening with labeled flow-sorted chromosomes, and preselection by hybridization to construct chromosome specific-cDNA libraries.

[0344] Precise chromosomal location of the polynucleotides can also be achieved using fluorescence in situ hybridization (FISH) of a metaphase chromosomal spread. This technique uses polynucleotides as short as 500 or 600 bases; however, polynucleotides 2,000-4,000 bp are preferred. For a review of this technique, see Verma et al., “Human Chromosomes: a Manual of Basic Techniques,” Pergamon Press, New York (1988).

[0345] For chromosome mapping, the polynucleotides can be used individually (to mark a single chromosome or a single site on that chromosome) or in panels (for marking multiple sites and/or multiple chromosomes). Preferred polynucleotides correspond to the noncoding regions of the cDNAs because the coding sequences are more likely conserved within gene families, thus increasing the chance of cross hybridization during chromosomal mapping.

[0346] Once a polynucleotide has been mapped to a precise chromosomal location, the physical position of the polynucleotide can be used in linkage analysis. Linkage analysis establishes coinheritance between a chromosomal location and presentation of a particular disease. (Disease mapping data are found, for example, in V. McKusick, Mendelian Inheritance in Man (available on line through Johns Hopkins University Welch Medical Library).) Assuming 1 megabase mapping resolution and one gene per 20 kb, a cDNA precisely localized to a chromosomal region associated with the disease could be one of 50-500 potential causative genes.

[0347] Thus, once coinheritance is established, differences in the polynucleotide and the corresponding gene between affected and unaffected individuals can be examined. First, visible structural alterations in the chromosomes, such as deletions or translocations, are examined in chromosome spreads or by PCR. If no structural alterations exist, the presence of point mutations are ascertained. Mutations observed in some or all affected individuals, but not in normal individuals, indicates that the mutation may cause the disease. However, complete sequencing of the polypeptide and the corresponding gene from several normal individuals is required to distinguish the mutation from a polymorphism. If a new polymorphism is identified, this polymorphic polypeptide can be used for further linkage analysis.

[0348] Furthermore, increased or decreased expression of the gene in affected individuals as compared to unaffected individuals can be assessed using polynucleotides of the present invention. Any of these alterations (altered expression, chromosomal rearrangement, or mutation) can be used as a diagnostic or prognostic marker.

[0349] In addition to the foregoing, a polynucleotide can be used to control gene expression through triple helix formation or antisense DNA or RNA. Both methods rely on binding of the polynucleotide to DNA or RNA. For these techniques, preferred polynucleotides are usually 20 to 40 bases in length and complementary to either the region of the gene involved in transcription (triple helix—see Lee et al., Nucl. Acids Res. 6: 3073 (1979); Cooney et al., Science 241: 456 (1988); and Dervan et al., Science 251: 1360 (1991)) or to the mRNA itself (antisense—Okano, J. Neurochem. 56: 560 (1991); Oligodeoxy-nucleotides as Antisense Inhibitors of Gene Expression, CRC Press, Boca Raton, Fla. (1988).) Triple helix formation optimally results in a shut-off of RNA transcription from DNA, while antisense RNA hybridization blocks translation of an mRNA molecule into polypeptide. Both techniques are effective in model systems, and the information disclosed herein can be used to design antisense or triple helix polynucleotides in an effort to treat disease.

[0350] Polynucleotides of the present invention are also useful in gene therapy. One goal of gene therapy is to insert a normal gene into an organism having a defective gene, in an effort to correct the genetic defect. The polynucleotides disclosed in the present invention offer a means of targeting such genetic defects in a highly accurate manner. Another goal is to insert a new gene that was not present in the host genome, thereby producing a new trait in the host cell.

[0351] The polynucleotides are also useful for identifying individuals from minute biological samples. The United States military, for example, is considering the use of restriction fragment length polymorphism (RFLP) for identification of its personnel. In this technique, an individual's genomic DNA is digested with one or more restriction enzymes, and probed on a Southern blot to yield unique bands for identifying personnel. This method does not suffer from the current limitations of “Dog Tags” which can be lost, switched, or stolen, making positive identification difficult. The polynucleotides of the present invention can be used as additional DNA markers for RFLP.

[0352] The polynucleotides of the present invention can also be used as an alternative to RFLP, by determining the actual base-by-base DNA sequence of selected portions of an individual's genome. These sequences can be used to prepare PCR primers for amplifying and isolating such selected DNA, which can then be sequenced. Using this technique, individuals can be identified because each individual will have a unique set of DNA sequences. Once an unique ID database is established for an individual, positive identification of that individual, living or dead, can be made from extremely small tissue samples.

[0353] Forensic biology also benefits from using DNA-based identification techniques as disclosed herein. DNA sequences taken from very small biological samples such as tissues, e.g., hair or skin, or body fluids, e.g., blood, saliva, semen, etc., can be amplified using PCR. In one prior art technique, gene sequences amplified from polymorphic loci, such as DQa class II HLA gene, are used in forensic biology to identify individuals. (Erlich, H., PCR Technology, Freeman and Co. (1992).) Once these specific polymorphic loci are amplified, they are digested with one or more restriction enzymes, yielding an identifying set of bands on a Southern blot probed with DNA corresponding to the DQa class II HLA gene. Similarly, polynucleotides of the present invention can be used as polymorphic markers for forensic purposes.

[0354] There is also a need for reagents capable of identifying the source of a particular tissue. Such need arises, for example, in forensics when presented with tissue of unknown origin. Appropriate reagents can comprise, for example, DNA probes or primers specific to particular tissue prepared from the sequences of the present invention. Panels of such reagents can identify tissue by species and/or by organ type. In a similar fashion, these reagents can be used to screen tissue cultures for contamination.

[0355] In the very least, the polynucleotides of the present invention can be used as molecular weight markers on Southern gels, as diagnostic probes for the presence of a specific mRNA in a particular cell type, as a probe to “subtract-out” known sequences in the process of discovering novel polynucleotides, for selecting and making oligomers for attachment to a “gene chip” or other support, to raise anti-DNA antibodies using DNA immunization techniques, and as an antigen to elicit an immune response.

Uses of the Polypeptides

[0356] Each of the polypeptides identified herein can be used in numerous ways. The following description should be considered exemplary and utilizes known techniques.

[0357] A polypeptide of the present invention can be used to assay protein levels in a biological sample using antibody-based techniques. For example, protein expression in tissues can be studied with classical immunohistological methods. (Jalkanen, M., et al., J. Cell. Biol. 101: 976-985 (1985); Jalkanen, M., et al., J. Cell. Biol. 105: 3087-3096 (1987).) Other antibody-based methods useful for detecting protein gene expression include immunoassays, such as the enzyme linked immunosorbent assay (ELISA) and the radioimmunoassay (RIA). Suitable antibody assay labels are known in the art and include enzyme labels, such as, glucose oxidase, and radioisotopes, such as iodine (125I, 121I), carbon (14C), sulfur (35S), tritium (3H), indium (112In), and technetium (99mTc), and fluorescent labels, such as fluorescein and rhodamine, and biotin.

[0358] In addition to assaying secreted protein levels in a biological sample, proteins can also be detected in vivo by imaging. Antibody labels or markers for in vivo imaging of protein include those detectable by X-radiography, NMR or ESR. For X-radiography, suitable labels include radioisotopes such as barium or cesium, which emit detectable radiation but are not overtly harmful to the subject. Suitable markers for NMR and ESR include those with a detectable characteristic spin, such as deuterium, which may be incorporated into the antibody by labeling of nutrients for the relevant hybridoma.

[0359] A protein-specific antibody or antibody fragment which has been labeled with an appropriate detectable imaging moiety, such as a radioisotope (for example, 131I, 112In, 99mTc), a radio-opaque substance, or a material detectable by nuclear magnetic resonance, is introduced (for example, parenterally, subcutaneously, or intraperitoneally) into the mammal. It will be understood in the art that the size of the subject and the imaging system used will determine the quantity of imaging moiety needed to produce diagnostic images. In the case of a radioisotope moiety, for a human subject, the quantity of radioactivity injected will normally range from about 5 to 20 millicuries of 99 mTc. The labeled antibody or antibody fragment will then preferentially accumulate at the location of cells which contain the specific protein. In vivo tumor imaging is described in S. W. Burchiel et al., “Immunopharmacokinetics of Radiolabeled Antibodies and Their Fragments.” (Chapter 13 in Tumor Imaging: The Radiochemical Detection of Cancer, S. W. Burchiel and B. A. Rhodes, eds., Masson Publishing Inc. (1982).)

[0360] Thus, the invention provides a diagnostic method of a disorder, which involves (a) assaying the expression of a polypeptide of the present invention in cells or body fluid of an individual; (b) comparing the level of gene expression with a standard gene expression level, whereby an increase or decrease in the assayed polypeptide gene expression level compared to the standard expression level is indicative of a disorder.

[0361] Moreover, polypeptides of the present invention can be used to treat disease. For example, patients can be administered a polypeptide of the present invention in an effort to replace absent or decreased levels of the polypeptide (e.g., insulin), to supplement absent or decreased levels of a different polypeptide (e.g., hemoglobin S for hemoglobin B), to inhibit the activity of a polypeptide (e.g., an oncogene), to activate the activity of a polypeptide (e.g., by binding to a receptor), to reduce the activity of a membrane bound receptor by competing with it for free ligand (e.g., soluble TNF receptors used in reducing inflammation), or to bring about a desired response (e.g., blood vessel growth).

[0362] Similarly, antibodies directed to a polypeptide of the present invention can also be used to treat disease. For example, administration of an antibody directed to a polypeptide of the present invention can bind and reduce overproduction of the polypeptide. Similarly, administration of an antibody can activate the polypeptide, such as by binding to a polypeptide bound to a membrane (receptor).

[0363] At the very least, the polypeptides of the present invention can be used as molecular weight markers on SDS-PAGE gels or on molecular sieve gel filtration columns using methods well known to those of skill in the art. Polypeptides can also be used to raise antibodies, which in turn are used to measure protein expression from a recombinant cell, as a way of assessing transformation of the host cell. Moreover, the polypeptides of the present invention can be used to test the following biological activities.

Biological Activities

[0364] The polynucleotides and polypeptides of the present invention can be used in assays to test for one or more biological activities. If these polynucleotides and polypeptides do exhibit activity in a particular assay, it is likely that these molecules may be involved in the diseases associated with the biological activity. Thus, the polynucleotides and polypeptides could be used to treat the associated disease.

Immune Activity

[0365] A polypeptide or polynucleotide of the present invention may be useful in treating deficiencies or disorders of the immune system, by activating or inhibiting the proliferation, differentiation, or mobilization (chemotaxis) of immune cells. Immune cells develop through a process called hematopoiesis, producing myeloid (platelets, red blood cells, neutrophils, and macrophages) and lymphoid (B and T lymphocytes) cells from pluripotent stem cells. The etiology of these immune deficiencies or disorders may be genetic, somatic, such as cancer or some autoimmune disorders, acquired (e.g., by chemotherapy or toxins), or infectious. Moreover, a polynucleotide or polypeptide of the present invention can be used as a marker or detector of a particular immune system disease or disorder.

[0366] A polynucleotide or polypeptide of the present invention may be useful in treating or detecting deficiencies or disorders of hematopoietic cells. A polypeptide or polynucleotide of the present invention could be used to increase differentiation and proliferation of hematopoietic cells, including the pluripotent stem cells, in an effort to treat those disorders associated with a decrease in certain (or many) types hematopoietic cells. Examples of immunologic deficiency syndromes include, but are not limited to: blood protein disorders (e.g. agammaglobulinemia, dysgammaglobulinemia), ataxia telangiectasia, common variable immunodeficiency, Digeorge Syndrome, HIV infection, HTLV-BLV infection, leukocyte adhesion deficiency syndrome, lymphopenia, phagocyte bactericidal dysfunction, severe combined immunodeficiency (SCIDs), Wiskott-Aldrich Disorder, anemia, thrombocytopenia, or hemoglobinuria.

[0367] Moreover, a polypeptide or polynucleotide of the present invention could also be used to modulate hemostatic (the stopping of bleeding) or thrombolytic activity (clot formation). For example, by increasing hemostatic or thrombolytic activity, a polynucleotide or polypeptide of the present invention could be used to treat blood coagulation disorders (e.g., afibrinogenemia, factor deficiencies), blood platelet disorders (e.g. thrombocytopenia), or wounds resulting from trauma, surgery, or other causes. Alternatively, a polynucleotide or polypeptide of the present invention that can decrease hemostatic or thrombolytic activity could be used to inhibit or dissolve clotting. These molecules could be important in the treatment of heart attacks (infarction), strokes, or scarring.

[0368] A polynucleotide or polypeptide of the present invention may also be useful in treating or detecting autoimmune disorders. Many autoimmune disorders result from inappropriate recognition of self as foreign material by immune cells. This inappropriate recognition results in an immune response leading to the destruction of the host tissue. Therefore, the administration of a polypeptide or polynucleotide of the present invention that inhibits an immune response, particularly the proliferation, differentiation, or chemotaxis of T-cells, may be an effective therapy in preventing autoimmune disorders.

[0369] Examples of autoimmune disorders that can be treated or detected by the present invention include, but are not limited to: Addison's Disease, hemolytic anemia, antiphospholipid syndrome, rheumatoid arthritis, dermatitis, allergic encephalomyelitis, glomerulonephritis, Goodpasture's Syndrome, Graves' Disease, Multiple Sclerosis, Myasthenia Gravis, Neuritis, Ophthalmia, Bullous Pemphigoid, Pemphigus, Polyendocrinopathies, Purpura, Reiter's Disease, Stiff-Man Syndrome, Autoimmune Thyroiditis, Systemic Lupus Erythematosus, Autoimmune Pulmonary Inflammation, Guillain-Barre Syndrome, insulin dependent diabetes mellitis, and autoimmune inflammatory eye disease.

[0370] Similarly, allergic reactions and conditions, such as asthma (particularly allergic asthma) or other respiratory problems, may also be treated by a polypeptide or polynucleotide of the present invention. Moreover, these molecules can be used to treat anaphylaxis, hypersensitivity to an antigenic molecule, or blood group incompatibility.

[0371] A polynucleotide or polypeptide of the present invention may also be used to treat and/or prevent organ rejection or graft-versus-host disease (GVHD). Organ rejection occurs by host immune cell destruction of the transplanted tissue through an immune response. Similarly, an immune response is also involved in GVHD, but, in this case, the foreign transplanted immune cells destroy the host tissues. The administration of a polypeptide or polynucleotide of the present invention that inhibits an immune response, particularly the proliferation, differentiation, or chemotaxis of T-cells, may be an effective therapy in preventing organ rejection or GVHD.

[0372] Similarly, a polypeptide or polynucleotide of the present invention may also be used to modulate inflammation. For example, the polypeptide or polynucleotide may inhibit the proliferation and differentiation of cells involved in an inflammatory response. These molecules can be used to treat inflammatory conditions, both chronic and acute conditions, including inflammation associated with infection (e.g., septic shock, sepsis, or systemic inflammatory response syndrome (SIRS)), ischemia-reperfusion injury, endotoxin lethality, arthritis, complement-mediated hyperacute rejection, nephritis, cytokine or chemokine induced lung injury, inflammatory bowel disease, Crohn's disease, or resulting from over production of cytokines (e.g., TNF or IL-1.)

Hyperproliferative Disorders

[0373] A polypeptide or polynucleotide can be used to treat or detect hyperproliferative disorders, including neoplasms. A polypeptide or polynucleotide of the present invention may inhibit the proliferation of the disorder through direct or indirect interactions. Alternatively, a polypeptide or polynucleotide of the present invention may proliferate other cells which can inhibit the hyperproliferative disorder.

[0374] For example, by increasing an immune response, particularly increasing antigenic qualities of the hyperproliferative disorder or by proliferating, differentiating, or mobilizing T-cells, hyperproliferative disorders can be treated. This immune response may be increased by either enhancing an existing immune response, or by initiating a new immune response. Alternatively, decreasing an immune response may also be a method of treating hyperproliferative disorders, such as a chemotherapeutic agent.

[0375] Examples of hyperproliferative disorders that can be treated or detected by a polynucleotide or polypeptide of the present invention include, but are not limited to neoplasms located in the: abdomen, bone, breast, digestive system, liver, pancreas, peritoneum, endocrine glands (adrenal, parathyroid, pituitary, testicles, ovary, thymus, thyroid), eye, head and neck, nervous (central and peripheral), lymphatic system, pelvic, skin, soft tissue, spleen, thoracic, and urogenital.

[0376] Similarly, other hyperproliferative disorders can also be treated or detected by a polynucleotide or polypeptide of the present invention. Examples of such hyperproliferative disorders include, but are not limited to: hypergammaglobulinemia, lymphoproliferative disorders, paraproteinemias, purpura, sarcoidosis, Sezary Syndrome, Waldenstron's Macroglobulinemia, Gaucher's Disease, histiocytosis, and any other hyperproliferative disease, besides neoplasia, located in an organ system listed above.

Infectious Disease

[0377] A polypeptide or polynucleotide of the present invention can be used to treat or detect infectious agents. For example, by increasing the immune response, particularly increasing the proliferation and differentiation of B and/or T cells, infectious diseases may be treated. The immune response may be increased by either enhancing an existing immune response, or by initiating a new immune response. Alternatively, the polypeptide or polynucleotide of the present invention may also directly inhibit the infectious agent, without necessarily eliciting an immune response.

[0378] Viruses are one example of an infectious agent that can cause disease or symptoms that can be treated or detected by a polynucleotide or polypeptide of the present invention. Examples of viruses, include, but are not limited to the following DNA and RNA viral families: Arbovirus, Adenoviridae, Arenaviridae, Arterivirus, Birnaviridae, Bunyaviridae, Caliciviridae, Circoviridae, Coronaviridae, Flaviviridae, Hepadnaviridae (Hepatitis), Herpesviridae (such as, Cytomegalovirus, Herpes Simplex, Herpes Zoster), Mononegavirus (e.g., Paramyxoviridae, Morbillivirus, Rhabdoviridae), Orthomyxoviridae (e.g., Influenza), Papovaviridae, Parvoviridae, Picornaviridae, Poxyiridae (such as Smallpox or Vaccinia), Reoviridae (e.g., Rotavirus), Retroviridae (HTLV-I, HTLV-II, Lentivirus), and Togaviridae (e.g., Rubivirus). Viruses falling within these families can cause a variety of diseases or symptoms, including, but not limited to: arthritis, bronchiollitis, encephalitis, eye infections (e.g., conjunctivitis, keratitis), chronic fatigue syndrome, hepatitis (A, B, C, E, Chronic Active, Delta), meningitis, opportunistic infections (e.g., AIDS), pneumonia, Burkitt's Lymphoma, chickenpox, hemorrhagic fever, Measles, Mumps, Parainfluenza, Rabies, the common cold, Polio, leukemia, Rubella, sexually transmitted diseases, skin diseases (e.g., Kaposi's, warts), and viremia. A polypeptide or polynucleotide of the present invention can be used to treat or detect any of these symptoms or diseases.

[0379] Similarly, bacterial or fungal agents that can cause disease or symptoms and that can be treated or detected by a polynucleotide or polypeptide of the present invention include, but not limited to, the following Gram-Negative and Gram-positive bacterial families and fungi: Actinomycetales (e.g., Corynebacterium, Mycobacterium, Norcardia), Aspergillosis, Bacillaceae (e.g., Anthrax, Clostridium), Bacteroidaceae, Blastomycosis, Bordetella, Borrelia, Brucellosis, Candidiasis, Campylobacter, Coccidioidomycosis, Cryptococcosis, Dermatocycoses, Enterobacteriaceae (Klebsiella, Salmonella, Serratia, Yersinia), Erysipelothrix, Helicobacter, Legionellosis, Leptospirosis, Listeria, Mycoplasmatales, Neisseriaceae (e.g., Acinetobacter, Gonorrhea, Menigococcal), Pasteurellacea Infections (e.g., Actinobacillus, Heamophilus, Pasteurella), Pseudomonas, Rickettsiaceae, Chlamydiaceae, Syphilis, and Staphylococcal. These bacterial or fungal families can cause the following diseases or symptoms, including, but not limited to: bacteremia, endocarditis, eye infections (conjunctivitis, tuberculosis, uveitis), gingivitis, opportunistic infections (e.g., AIDS related infections), paronychia, prosthesis-related infections, Reiter's Disease, respiratory tract infections, such as Whooping Cough or Empyema, sepsis, Lyme Disease, Cat-Scratch Disease, Dysentery, Paratyphoid Fever, food poisoning, Typhoid, pneumonia, Gonorrhea, meningitis, Chlamydia, Syphilis, Diphtheria, Leprosy, Paratuberculosis, Tuberculosis, Lupus, Botulism, gangrene, tetanus, impetigo, Rheumatic Fever, Scarlet Fever, sexually transmitted diseases, skin diseases (e.g., cellulitis, dermatocycoses), toxemia, urinary tract infections, wound infections. A polypeptide or polynucleotide of the present invention can be used to treat or detect any of these symptoms or diseases.

[0380] Moreover, parasitic agents causing disease or symptoms that can be treated or detected by a polynucleotide or polypeptide of the present invention include, but not limited to, the following families: Amebiasis, Babesiosis, Coccidiosis, Cryptosporidiosis, Dientamoebiasis, Dourine, Ectoparasitic, Giardiasis, Helminthiasis, Leishmaniasis, Theileriasis, Toxoplasmosis, Trypanosomiasis, and Trichomonas. These parasites can cause a variety of diseases or symptoms, including, but not limited to: Scabies, Trombiculiasis, eye infections, intestinal disease (e.g., dysentery, giardiasis), liver disease, lung disease, opportunistic infections (e.g., AIDS related), Malaria, pregnancy complications, and toxoplasmosis. A polypeptide or polynucleotide of the present invention can be used to treat or detect any of these symptoms or diseases.

[0381] Preferably, treatment using a polypeptide or polynucleotide of the present invention could either be by administering an effective amount of a polypeptide to the patient, or by removing cells from the patient, supplying the cells with a polynucleotide of the present invention, and returning the engineered cells to the patient (ex vivo therapy). Moreover, the polypeptide or polynucleotide of the present invention can be used as an antigen in a vaccine to raise an immune response against infectious disease.

Regeneration

[0382] A polynucleotide or polypeptide of the present invention can be used to differentiate, proliferate, and attract cells, leading to the regeneration of tissues. (See, Science 276: 59-87 (1997).) The regeneration of tissues could be used to repair, replace, or protect tissue damaged by congenital defects, trauma (wounds, burns, incisions, or ulcers), age, disease (e.g. osteoporosis, osteocarthritis, periodontal disease, liver failure), surgery, including cosmetic plastic surgery, fibrosis, reperfusion injury, or systemic cytokine damage.

[0383] Tissues that could be regenerated using the present invention include organs (e.g., pancreas, liver, intestine, kidney, skin, endothelium), muscle (smooth, skeletal or cardiac), vascular (including vascular endothelium), nervous, hematopoietic, and skeletal (bone, cartilage, tendon, and ligament) tissue. Preferably, regeneration occurs without or decreased scarring. Regeneration also may include angiogenesis.

[0384] Moreover, a polynucleotide or polypeptide of the present invention may increase regeneration of tissues difficult to heal. For example, increased tendon/ligament regeneration would quicken recovery time after damage. A polynucleotide or polypeptide of the present invention could also be used prophylactically in an effort to avoid damage. Specific diseases that could be treated include of tendinitis, carpal tunnel syndrome, and other tendon or ligament defects. A further example of tissue regeneration of non-healing wounds includes pressure ulcers, ulcers associated with vascular insufficiency, surgical, and traumatic wounds.

[0385] Similarly, nerve and brain tissue could also be regenerated by using a polynucleotide or polypeptide of the present invention to proliferate and differentiate nerve cells. Diseases that could be treated using this method include central and peripheral nervous system diseases, neuropathies, or mechanical and traumatic disorders (e.g., spinal cord disorders, head trauma, cerebrovascular disease, and stoke). Specifically, diseases associated with peripheral nerve injuries, peripheral neuropathy (e.g., resulting from chemotherapy or other medical therapies), localized neuropathies, and central nervous system diseases (e.g., Alzheimer's disease, Parkinson's disease, Huntington's disease, amyotrophic lateral sclerosis, and Shy-Drager syndrome), could all be treated using the polynucleotide or polypeptide of the present invention.

Chemotaxis

[0386] A polynucleotide or polypeptide of the present invention may have chemotaxis activity. A chemotaxic molecule attracts or mobilizes cells (e.g., monocytes, fibroblasts, neutrophils, T-cells, mast cells, eosinophils, epithelial and/or endothelial cells) to a particular site in the body, such as inflammation, infection, or site of hyperproliferation. The mobilized cells can then fight off and/or heal the particular trauma or abnormality.

[0387] A polynucleotide or polypeptide of the present invention may increase chemotaxic activity of particular cells. These chemotactic molecules can then be used to treat inflammation, infection, hyperproliferative disorders, or any immune system disorder by increasing the number of cells targeted to a particular location in the body. For example, chemotaxic molecules can be used to treat wounds and other trauma to tissues by attracting immune cells to the injured location. Chemotactic molecules of the present invention can also attract fibroblasts, which can be used to treat wounds.

[0388] It is also contemplated that a polynucleotide or polypeptide of the present invention may inhibit chemotactic activity. These molecules could also be used to treat disorders. Thus, a polynucleotide or polypeptide of the present invention could be used as an inhibitor of chemotaxis.

Binding Activity

[0389] A polypeptide of the present invention may be used to screen for molecules that bind to the polypeptide or for molecules to which the polypeptide binds. The binding of the polypeptide and the molecule may activate (agonist), increase, inhibit (antagonist), or decrease activity of the polypeptide or the molecule bound. Examples of such molecules include antibodies, oligonucleotides, proteins (e.g., receptors), or small molecules.

[0390] Preferably, the molecule is closely related to the natural ligand of the polypeptide, e.g., a fragment of the ligand, or a natural substrate, a ligand, a structural or functional mimetic. (See, Coligan et al., Current Protocols in Immunology 1(2): Chapter 5 (1991).) Similarly, the molecule can be closely related to the natural receptor to which the polypeptide binds, or at least, a fragment of the receptor capable of being bound by the polypeptide (e.g., active site). In either case, the molecule can be rationally designed using known techniques.

[0391] Preferably, the screening for these molecules involves producing appropriate cells which express the polypeptide, either as a secreted protein or on the cell membrane. Preferred cells include cells from mammals, yeast, Drosophila, or E. coli. Cells expressing the polypeptide (or cell membrane containing the expressed polypeptide) are then preferably contacted with a test compound potentially containing the molecule to observe binding, stimulation, or inhibition of activity of either the polypeptide or the molecule.

[0392] The assay may simply test binding of a candidate compound to the polypeptide, wherein binding is detected by a label, or in an assay involving competition with a labeled competitor. Further, the assay may test whether the candidate compound results in a signal generated by binding to the polypeptide.

[0393] Alternatively, the assay can be carried out using cell-free preparations, polypeptide/molecule affixed to a solid support, chemical libraries, or natural product mixtures. The assay may also simply comprise the steps of mixing a candidate compound with a solution containing a polypeptide, measuring polypeptide/molecule activity or binding, and comparing the polypeptide/molecule activity or binding to a standard.

[0394] Preferably, an ELISA assay can measure polypeptide level or activity in a sample (e.g., biological sample) using a monoclonal or polyclonal antibody. The antibody can measure polypeptide level or activity by either binding, directly or indirectly, to the polypeptide or by competing with the polypeptide for a substrate.

[0395] All of these above assays can be used as diagnostic or prognostic markers. The molecules discovered using these assays can be used to treat disease or to bring about a particular result in a patient (e.g., blood vessel growth) by activating or inhibiting the polypeptide/molecule. Moreover, the assays can discover agents which may inhibit or enhance the production of the polypeptide from suitably manipulated cells or tissues.

[0396] Therefore, the invention includes a method of identifying compounds which bind to a polypeptide of the invention comprising the steps of: (a) incubating a candidate binding compound with a polypeptide of the invention; and (b) determining if binding has occurred. Moreover, the invention includes a method of identifying agonists/antagonists comprising the steps of: (a) incubating a candidate compound with a polypeptide of the invention, (b) assaying a biological activity, and (b) determining if a biological activity of the polypeptide has been altered.

Other Activities

[0397] A polypeptide or polynucleotide of the present invention may also increase or decrease the differentiation or proliferation of embryonic stem cells, besides, as discussed above, hematopoietic lineage.

[0398] A polypeptide or polynucleotide of the present invention may also be used to modulate mammalian characteristics, such as body height, weight, hair color, eye color, skin, percentage of adipose tissue, pigmentation, size, and shape (e.g., cosmetic surgery). Similarly, a polypeptide or polynucleotide of the present invention may be used to modulate mammalian metabolism affecting catabolism, anabolism, processing, utilization, and storage of energy.

[0399] A polypeptide or polynucleotide of the present invention may be used to change a mammal's mental state or physical state by influencing biorhythms, caricadic rhythms, depression (including depressive disorders), tendency for violence, tolerance for pain, reproductive capabilities (preferably by Activin or Inhibin-like activity), hormonal or endocrine levels, appetite, libido, memory, stress, or other cognitive qualities.

[0400] A polypeptide or polynucleotide of the present invention may also be used as a food additive or preservative, such as to increase or decrease storage capabilities, fat content, lipid, protein, carbohydrate, vitamins, minerals, cofactors or other nutritional components.

### Other Preferred Embodiments

[0401] Other preferred embodiments of the claimed invention include an isolated nucleic acid molecule comprising a nucleotide sequence which is at least 95% identical to a sequence of at least about 50 contiguous nucleotides in the nucleotide sequence of SEQ ID NO:X wherein X is any integer as defined in Table 1.

[0402] Also preferred is a nucleic acid molecule wherein said sequence of contiguous nucleotides is included in the nucleotide sequence of SEQ ID NO:X in the range of positions beginning with the nucleotide at about the position of the 5′ Nucleotide of the Clone Sequence and ending with the nucleotide at about the position of the 3′ Nucleotide of the Clone Sequence as defined for SEQ ID NO:X in Table 1.

[0403] Also preferred is a nucleic acid molecule wherein said sequence of contiguous nucleotides is included in the nucleotide sequence of SEQ ID NO:X in the range of positions beginning with the nucleotide at about the position of the 5′ Nucleotide of the Start Codon and ending with the nucleotide at about the position of the 3′ Nucleotide of the Clone Sequence as defined for SEQ ID NO:X in Table 1.

[0404] Similarly preferred is a nucleic acid molecule wherein said sequence of contiguous nucleotides is included in the nucleotide sequence of SEQ ID NO:X in the range of positions beginning with the nucleotide at about the position of the 5′ Nucleotide of the First Amino Acid of the Signal Peptide and ending with the nucleotide at about the position of the 3′ Nucleotide of the Clone Sequence as defined for SEQ ID NO:X in Table 1.

[0405] Also preferred is an isolated nucleic acid molecule comprising a nucleotide sequence which is at least 95% identical to a sequence of at least about 150 contiguous nucleotides in the nucleotide sequence of SEQ ID NO:X.

[0406] Further preferred is an isolated nucleic acid molecule comprising a nucleotide sequence which is at least 95% identical to a sequence of at least about 500 contiguous nucleotides in the nucleotide sequence of SEQ ID NO:X.

[0407] A further preferred embodiment is a nucleic acid molecule comprising a nucleotide sequence which is at least 95% identical to the nucleotide sequence of SEQ ID NO:X beginning with the nucleotide at about the position of the 5′ Nucleotide of the First Amino Acid of the Signal Peptide and ending with the nucleotide at about the position of the 3′ Nucleotide of the Clone Sequence as defined for SEQ ID NO:X in Table 1.

[0408] A further preferred embodiment is an isolated nucleic acid molecule comprising a nucleotide sequence which is at least 95% identical to the complete nucleotide sequence of SEQ ID NO:X.

[0409] Also preferred is an isolated nucleic acid molecule which hybridizes under stringent hybridization conditions to a nucleic acid molecule, wherein said nucleic acid molecule which hybridizes does not hybridize under stringent hybridization conditions to a nucleic acid molecule having a nucleotide sequence consisting of only a residues or of only T residues.

[0410] Also preferred is a composition of matter comprising a DNA molecule which comprises a human cDNA clone identified by a cDNA Clone Identifier in Table 1, which DNA molecule is contained in the material deposited with the American Type Culture Collection and given the ATCC™ Deposit Number shown in Table 1 for said cDNA Clone Identifier.

[0411] Also preferred is an isolated nucleic acid molecule comprising a nucleotide sequence which is at least 95% identical to a sequence of at least 50 contiguous nucleotides in the nucleotide sequence of a human cDNA clone identified by a cDNA Clone Identifier in Table 1, which DNA molecule is contained in the deposit given the ATCC™ Deposit Number shown in Table 1.

[0412] Also preferred is an isolated nucleic acid molecule, wherein said sequence of at least 50 contiguous nucleotides is included in the nucleotide sequence of the complete open reading frame sequence encoded by said human cDNA clone.

[0413] Also preferred is an isolated nucleic acid molecule comprising a nucleotide sequence which is at least 95% identical to sequence of at least 150 contiguous nucleotides in the nucleotide sequence encoded by said human cDNA clone.

[0414] A further preferred embodiment is an isolated nucleic acid molecule comprising a nucleotide sequence which is at least 95% identical to sequence of at least 500 contiguous nucleotides in the nucleotide sequence encoded by said human cDNA clone.

[0415] A further preferred embodiment is an isolated nucleic acid molecule comprising a nucleotide sequence which is at least 95% identical to the complete nucleotide sequence encoded by said human cDNA clone.

[0416] A further preferred embodiment is a method for detecting in a biological sample a nucleic acid molecule comprising a nucleotide sequence which is at least 95% identical to a sequence of at least 50 contiguous nucleotides in a sequence selected from the group consisting of: a nucleotide sequence of SEQ ID NO:X wherein X is any integer as defined in Table 1; and a nucleotide sequence encoded by a human cDNA clone identified by a cDNA Clone Identifier in Table 1 and contained in the deposit with the ATCC™ Deposit Number shown for said cDNA clone in Table 1; which method comprises a step of comparing a nucleotide sequence of at least one nucleic acid molecule in said sample with a sequence selected from said group and determining whether the sequence of said nucleic acid molecule in said sample is at least 95% identical to said selected sequence.

[0417] Also preferred is the above method wherein said step of comparing sequences comprises determining the extent of nucleic acid hybridization between nucleic acid molecules in said sample and a nucleic acid molecule comprising said sequence selected from said group. Similarly, also preferred is the above method wherein said step of comparing sequences is performed by comparing the nucleotide sequence determined from a nucleic acid molecule in said sample with said sequence selected from said group. The nucleic acid molecules can comprise DNA molecules or RNA molecules.

[0418] A further preferred embodiment is a method for identifying the species, tissue or cell type of a biological sample which method comprises a step of detecting nucleic acid molecules in said sample, if any, comprising a nucleotide sequence that is at least 95% identical to a sequence of at least 50 contiguous nucleotides in a sequence selected from the group consisting of: a nucleotide sequence of SEQ ID NO:X wherein X is any integer as defined in Table 1; and a nucleotide sequence encoded by a human cDNA clone identified by a cDNA Clone Identifier in Table 1 and contained in the deposit with the ATCC™ Deposit Number shown for said cDNA clone in Table 1.

[0419] The method for identifying the species, tissue or cell type of a biological sample can comprise a step of detecting nucleic acid molecules comprising a nucleotide sequence in a panel of at least two nucleotide sequences, wherein at least one sequence in said panel is at least 95% identical to a sequence of at least 50 contiguous nucleotides in a sequence selected from said group.

[0420] Also preferred is a method for diagnosing in a subject a pathological condition associated with abnormal structure or expression of a gene encoding a secreted protein identified in Table 1, which method comprises a step of detecting in a biological sample obtained from said subject nucleic acid molecules, if any, comprising a nucleotide sequence that is at least 95% identical to a sequence of at least 50 contiguous nucleotides in a sequence selected from the group consisting of: a nucleotide sequence of SEQ ID NO:X wherein X is any integer as defined in Table 1; and a nucleotide sequence encoded by a human cDNA clone identified by a cDNA Clone Identifier in Table 1 and contained in the deposit with the ATCC™ Deposit Number shown for said cDNA clone in Table 1.

[0421] The method for diagnosing a pathological condition can comprise a step of detecting nucleic acid molecules comprising a nucleotide sequence in a panel of at least two nucleotide sequences, wherein at least one sequence in said panel is at least 95% identical to a sequence of at least 50 contiguous nucleotides in a sequence selected from said group.

[0422] Also preferred is a composition of matter comprising isolated nucleic acid molecules wherein the nucleotide sequences of said nucleic acid molecules comprise a panel of at least two nucleotide sequences, wherein at least one sequence in said panel is at least 95% identical to a sequence of at least 50 contiguous nucleotides in a sequence selected from the group consisting of: a nucleotide sequence of SEQ ID NO:X wherein X is any integer as defined in Table 1; and a nucleotide sequence encoded by a human cDNA clone identified by a cDNA Clone Identifier in Table 1 and contained in the deposit with the ATCC™ Deposit Number shown for said cDNA clone in Table 1. The nucleic acid molecules can comprise DNA molecules or RNA molecules.

[0423] Also preferred is an isolated polypeptide comprising an amino acid sequence at least 90% identical to a sequence of at least about 10 contiguous amino acids in the amino acid sequence of SEQ ID NO:Y wherein Y is any integer as defined in Table 1.

[0424] Also preferred is a polypeptide, wherein said sequence of contiguous amino acids is included in the amino acid sequence of SEQ ID NO:Y in the range of positions beginning with the residue at about the position of the First Amino Acid of the Secreted Portion and ending with the residue at about the Last Amino Acid of the Open Reading Frame as set forth for SEQ ID NO:Y in Table 1.

[0425] Also preferred is an isolated polypeptide comprising an amino acid sequence at least 95% identical to a sequence of at least about 30 contiguous amino acids in the amino acid sequence of SEQ ID NO:Y.

[0426] Further preferred is an isolated polypeptide comprising an amino acid sequence at least 95% identical to a sequence of at least about 100 contiguous amino acids in the amino acid sequence of SEQ ID NO:Y.

[0427] Further preferred is an isolated polypeptide comprising an amino acid sequence at least 95% identical to the complete amino acid sequence of SEQ ID NO:Y.

[0428] Further preferred is an isolated polypeptide comprising an amino acid sequence at least 90% identical to a sequence of at least about 10 contiguous amino acids in the complete amino acid sequence of a secreted protein encoded by a human cDNA clone identified by a cDNA Clone Identifier in Table 1 and contained in the deposit with the ATCC™ Deposit Number shown for said cDNA clone in Table 1.

[0429] Also preferred is a polypeptide wherein said sequence of contiguous amino acids is included in the amino acid sequence of a secreted portion of the secreted protein encoded by a human cDNA clone identified by a cDNA Clone Identifier in Table 1 and contained in the deposit with the ATCC™ Deposit Number shown for said cDNA clone in Table I.

[0430] Also preferred is an isolated polypeptide comprising an amino acid sequence at least 95% identical to a sequence of at least about 30 contiguous amino acids in the amino acid sequence of the secreted portion of the protein encoded by a human cDNA clone identified by a cDNA Clone Identifier in Table 1 and contained in the deposit with the ATCC™ Deposit Number shown for said cDNA clone in Table 1.

[0431] Also preferred is an isolated polypeptide comprising an amino acid sequence at least 95% identical to a sequence of at least about 100 contiguous amino acids in the amino acid sequence of the secreted portion of the protein encoded by a human cDNA clone identified by a cDNA Clone Identifier in Table 1 and contained in the deposit with the ATCC™ Deposit Number shown for said cDNA clone in Table 1.

[0432] Also preferred is an isolated polypeptide comprising an amino acid sequence at least 95% identical to the amino acid sequence of the secreted portion of the protein encoded by a human cDNA clone identified by a cDNA Clone Identifier in Table 1 and contained in the deposit with the ATCC™ Deposit Number shown for said cDNA clone in Table 1.

[0433] Further preferred is an isolated antibody which binds specifically to a polypeptide comprising an amino acid sequence that is at least 90% identical to a sequence of at least 10 contiguous amino acids in a sequence selected from the group consisting of: an amino acid sequence of SEQ ID NO:Y wherein Y is any integer as defined in Table 1; and a complete amino acid sequence of a protein encoded by a human cDNA clone identified by a cDNA Clone Identifier in Table 1 and contained in the deposit with the ATCC™ Deposit Number shown for said cDNA clone in Table 1.

[0434] Further preferred is a method for detecting in a biological sample a polypeptide comprising an amino acid sequence which is at least 90% identical to a sequence of at least 10 contiguous amino acids in a sequence selected from the group consisting of: an amino acid sequence of SEQ ID NO:Y wherein Y is any integer as defined in Table 1; and a complete amino acid sequence of a protein encoded by a human cDNA clone identified by a cDNA Clone Identifier in Table 1 and contained in the deposit with the ATCC™ Deposit Number shown for said cDNA clone in Table 1; which method comprises a step of comparing an amino acid sequence of at least one polypeptide molecule in said sample with a sequence selected from said group and determining whether the sequence of said polypeptide molecule in said sample is at least 90% identical to said sequence of at least 10 contiguous amino acids.

[0435] Also preferred is the above method wherein said step of comparing an amino acid sequence of at least one polypeptide molecule in said sample with a sequence selected from said group comprises determining the extent of specific binding of polypeptides in said sample to an antibody which binds specifically to a polypeptide comprising an amino acid sequence that is at least 90% identical to a sequence of at least 10 contiguous amino acids in a sequence selected from the group consisting of: an amino acid sequence of SEQ ID NO:Y wherein Y is any integer as defined in Table 1; and a complete amino acid sequence of a protein encoded by a human cDNA clone identified by a cDNA Clone Identifier in Table 1 and contained in the deposit with the ATCC™ Deposit Number shown for said cDNA clone in Table 1.

[0436] Also preferred is the above method wherein said step of comparing sequences is performed by comparing the amino acid sequence determined from a polypeptide molecule in said sample with said sequence selected from said group.

[0437] Also preferred is a method for identifying the species, tissue or cell type of a biological sample which method comprises a step of detecting polypeptide molecules in said sample, if any, comprising an amino acid sequence that is at least 90% identical to a sequence of at least 10 contiguous amino acids in a sequence selected from the group consisting of: an amino acid sequence of SEQ ID NO:Y wherein Y is any integer as defined in Table 1; and a complete amino acid sequence of a secreted protein encoded by a human cDNA clone identified by a cDNA Clone Identifier in Table 1 and contained in the deposit with the ATCC™ Deposit Number shown for said cDNA clone in Table 1.

[0438] Also preferred is the above method for identifying the species, tissue or cell type of a biological sample, which method comprises a step of detecting polypeptide molecules comprising an amino acid sequence in a panel of at least two amino acid sequences, wherein at least one sequence in said panel is at least 90% identical to a sequence of at least 10 contiguous amino acids in a sequence selected from the above group.

[0439] Also preferred is a method for diagnosing in a subject a pathological condition associated with abnormal structure or expression of a gene encoding a secreted protein identified in Table 1, which method comprises a step of detecting in a biological sample obtained from said subject polypeptide molecules comprising an amino acid sequence in a panel of at least two amino acid sequences, wherein at least one sequence in said panel is at least 90% identical to a sequence of at least 10 contiguous amino acids in a sequence selected from the group consisting of: an amino acid sequence of SEQ ID NO:Y wherein Y is any integer as defined in Table 1; and a complete amino acid sequence of a secreted protein encoded by a human cDNA clone identified by a cDNA Clone Identifier in Table 1 and contained in the deposit with the ATCC™ Deposit Number shown for said cDNA clone in Table 1.

[0440] In any of these methods, the step of detecting said polypeptide molecules includes using an antibody.

[0441] Also preferred is an isolated nucleic acid molecule comprising a nucleotide sequence which is at least 95% identical to a nucleotide sequence encoding a polypeptide wherein said polypeptide comprises an amino acid sequence that is at least 90% identical to a sequence of at least 10 contiguous amino acids in a sequence selected from the group consisting of: an amino acid sequence of SEQ ID NO:Y wherein Y is any integer as defined in Table 1; and a complete amino acid sequence of a secreted protein encoded by a human cDNA clone identified by a cDNA Clone Identifier in Table 1 and contained in the deposit with the ATCC™ Deposit Number shown for said cDNA clone in Table 1.

[0442] Also preferred is an isolated nucleic acid molecule, wherein said nucleotide sequence encoding a polypeptide has been optimized for expression of said polypeptide in a prokaryotic host.

[0443] Also preferred is an isolated nucleic acid molecule, wherein said polypeptide comprises an amino acid sequence selected from the group consisting of: an amino acid sequence of SEQ ID NO:Y wherein Y is any integer as defined in Table 1; and a complete amino acid sequence of a secreted protein encoded by a human cDNA clone identified by a cDNA Clone Identifier in Table 1 and contained in the deposit with the ATCC™ Deposit Number shown for said cDNA clone in Table 1.

[0444] Further preferred is a method of making a recombinant vector comprising inserting any of the above isolated nucleic acid molecule into a vector. Also preferred is the recombinant vector produced by this method. Also preferred is a method of making a recombinant host cell comprising introducing the vector into a host cell, as well as the recombinant host cell produced by this method.

[0445] Also preferred is a method of making an isolated polypeptide comprising culturing this recombinant host cell under conditions such that said polypeptide is expressed and recovering said polypeptide. Also preferred is this method of making an isolated polypeptide, wherein said recombinant host cell is a eukaryotic cell and said polypeptide is a secreted portion of a human secreted protein comprising an amino acid sequence selected from the group consisting of: an amino acid sequence of SEQ ID NO:Y beginning with the residue at the position of the First Amino Acid of the Secreted Portion of SEQ ID NO:Y wherein Y is an integer set forth in Table 1 and said position of the First Amino Acid of the Secreted Portion of SEQ ID NO:Y is defined in Table 1; and an amino acid sequence of a secreted portion of a protein encoded by a human cDNA clone identified by a cDNA Clone Identifier in Table 1 and contained in the deposit with the ATCC™ Deposit Number shown for said cDNA clone in Table 1. The isolated polypeptide produced by this method is also preferred.

[0446] Also preferred is a method of treatment of an individual in need of an increased level of a secreted protein activity, which method comprises administering to such an individual a pharmaceutical composition comprising an amount of an isolated polypeptide, polynucleotide, or antibody of the claimed invention effective to increase the level of said protein activity in said individual.

[0447] Having generally described the invention, the same will be more readily understood by reference to the following examples, which are provided by way of illustration and are not intended as limiting.

### EXAMPLES

### Example 1

### Isolation of a Selected cDNA Clone from the Deposited Sample

[0448] Each cDNA clone in a cited ATCC™ deposit is contained in a plasmid vector. Table 1 identifies the vectors used to construct the cDNA library from which each clone was isolated. In many cases, the vector used to construct the library is a phage vector from which a plasmid has been excised. The table immediately below correlates the related plasmid for each phage vector used in constructing the cDNA library. For example, where a particular clone is identified in Table 1 as being isolated in the vector “Lambda Zap,” the corresponding deposited clone is in “pBLUESCRIPT™.”

| Vector Used to Construct Library | Corresponding Deposited Plasmid |
|---|---|
| Lambda Zap | pBLUESCRIPT ™ (pBS) |
| Uni-Zap XR | pBLUESCRIPT ™ (pBS) |
| Zap Express | pBK |
| lafmid BA | plafmid BA |
| pSport1 | pSport1 |
| pCMVSport 2.0 | pCMVSport 2.0 |
| pCMVSport 3.0 | pCMVSport 3.0 |
| pCR ® 2.1 | pCR ® 2.1 |

[0449] Vectors Lambda Zap (U.S. Pat. Nos. 5,128,256 and 5,286,636), Uni-Zap XR (U.S. Pat. Nos. 5,128,256 and 5,286,636), Zap Express (U.S. Pat. Nos. 5,128,256 and 5,286,636), pBLUESCRIPT™ (pBS) (Short, J. M. et al., Nucleic Acids Res. 16: 7583-7600 (1988); Alting-Mees, M. A. and Short, J. M., Nucleic Acids Res. 17: 9494 (1989)) and pBK (Alting-Mees, M. A. et al., Strategies 5: 58-61 (1992)) are commercially available from Stratagene Cloning Systems, Inc., 11011 N. Torrey Pines Road, La Jolla, Calif., 92037. pBS contains an ampicillin resistance gene and pBK contains a neomycin resistance gene. Both can be transformed into E. coli strain XL-1 Blue, also available from STRATAGENE™. pBS comes in 4 forms SK+, SK−, KS+ and KS. The S and K refers to the orientation of the polylinker to the T7 and T3 primer sequences which flank the polylinker region (“S” is for SacI and “K” is for KpnI which are the first sites on each respective end of the linker). “+” or “−” refer to the orientation of the f1 origin of replication (“ori”), such that in one orientation, single stranded rescue initiated from the fl ori generates sense strand DNA and in the other, antisense.

[0450] Vectors pSport1, pCMVSport 2.0 and pCMVSport 3.0, were obtained from Life Technologies, Inc., P.O. Box 6009, Gaithersburg, Md. 20897. All Sport vectors contain an ampicillin resistance gene and may be transformed into E. coli strain DH10B, also available from Life Technologies. (See, for instance, Gruber, C. E., et al., Focus 15: 59 (1993).) Vector lafmid BA (Bento Soares, Columbia University, NY) contains an ampicillin resistance gene and can be transformed into E. coli strain XL-1 Blue. Vector pCR® 2.1, which is available from Invitrogen, 1600 Faraday Avenue, Carlsbad, Calif. 92008, contains an ampicillin resistance gene and may be transformed into E. coli strain DH10B, available from Life Technologies. (See, for instance, Clark, J. M., Nuc. Acids Res. 16: 9677-9686 (1988) and Mead, D. et al., Bio/Technology 9: (1991).) Preferably, a polynucleotide of the present invention does not comprise the phage vector sequences identified for the particular clone in Table 1, as well as the corresponding plasmid vector sequences designated above.

[0451] The deposited material in the sample assigned the ATCC™ Deposit Number cited in Table 1 for any given cDNA clone also may contain one or more additional plasmids, each comprising a cDNA clone different from that given clone. Thus, deposits sharing the same ATCC™ Deposit Number contain at least a plasmid for each cDNA clone identified in Table 1. Typically, each ATCC™ deposit sample cited in Table 1 comprises a mixture of approximately equal amounts (by weight) of about 50 plasmid DNAs, each containing a different cDNA clone; but such a deposit sample may include plasmids for more or less than 50 cDNA clones, up to about 500 cDNA clones.

[0452] Two approaches can be used to isolate a particular clone from the deposited sample of plasmid DNAs cited for that clone in Table 1. First, a plasmid is directly isolated by screening the clones using a polynucleotide probe corresponding to SEQ ID NO:X.

[0453] Particularly, a specific polynucleotide with 30-40 nucleotides is synthesized using an Applied Biosystems DNA synthesizer according to the sequence reported. The oligonucleotide is labeled, for instance, with ³²P-γ-ATP using T4 polynucleotide kinase and purified according to routine methods. (E.g., Maniatis et al., Molecular Cloning: a Laboratory Manual, Cold Spring Harbor Press, Cold Spring, N.Y. (1982).) The plasmid mixture is transformed into a suitable host, as indicated above (such as XL-1 Blue (STRATAGENE™)) using techniques known to those of skill in the art, such as those provided by the vector supplier or in related publications or patents cited above. The transformants are plated on 1.5% agar plates (containing the appropriate selection agent, e.g., ampicillin) to a density of about 150 transformants (colonies) per plate. These plates are screened using Nylon membranes according to routine methods for bacterial colony screening (e.g., Sambrook et al., Molecular Cloning: a Laboratory Manual, 2nd Edit., (1989), Cold Spring Harbor Laboratory Press, pages 1.93 to 1.104), or other techniques known to those of skill in the art.

[0454] Alternatively, two primers of 17-20 nucleotides derived from both ends of the SEQ ID NO:X (i.e., within the region of SEQ ID NO:X bounded by the 5′ NT and the 3′ NT of the clone defined in Table 1) are synthesized and used to amplify the desired cDNA using the deposited cDNA plasmid as a template. The polymerase chain reaction is carried out under routine conditions, for instance, in 25 μl of reaction mixture with 0.5 μg of the above cDNA template. a convenient reaction mixture is 1.5-5 mM MgCl₂, 0.01% (w/v) gelatin, 20 μM each of dATP, dCTP, dGTP, dTTP, 25 pmol of each primer and 0.25 Unit of Taq polymerase. Thirty five cycles of PCR (denaturation at 94° C. for 1 min; annealing at 55° C. for 1 min; elongation at 72° C. for 1 min) are performed with a Perkin-Elmer Cetus automated thermal cycler. The amplified product is analyzed by agarose gel electrophoresis and the DNA band with expected molecular weight is excised and purified. The PCR product is verified to be the selected sequence by subcloning and sequencing the DNA product.

[0455] Several methods are available for the identification of the 5′ or 3′ non-coding portions of a gene which may not be present in the deposited clone. These methods include but are not limited to, filter probing, clone enrichment using specific probes, and protocols similar or identical to 5′ and 3′ “RACE” protocols which are well known in the art. For instance, a method similar to 5′ RACE is available for generating the missing 5′ end of a desired full-length transcript. (Fromont-Racine et al., Nucleic Acids Res. 21(7): 1683-1684 (1993).)

[0456] Briefly, a specific RNA oligonucleotide is ligated to the 5′ ends of a population of RNA presumably containing full-length gene RNA transcripts. a primer set containing a primer specific to the ligated RNA oligonucleotide and a primer specific to a known sequence of the gene of interest is used to PCR amplify the 5′ portion of the desired full-length gene. This amplified product may then be sequenced and used to generate the full length gene.

[0457] This above method starts with total RNA isolated from the desired source, although poly-A+ RNA can be used. The RNA preparation can then be treated with phosphatase if necessary to eliminate 5′ phosphate groups on degraded or damaged RNA which may interfere with the later RNA ligase step. The phosphatase should then be inactivated and the RNA treated with tobacco acid pyrophosphatase in order to remove the cap structure present at the 5′ ends of messenger RNAs. This reaction leaves a 5′ phosphate group at the 5′ end of the cap cleaved RNA which can then be ligated to an RNA oligonucleotide using T4 RNA ligase.

[0458] This modified RNA preparation is used as a template for first strand cDNA synthesis using a gene specific oligonucleotide. The first strand synthesis reaction is used as a template for PCR amplification of the desired 5′ end using a primer specific to the ligated RNA oligonucleotide and a primer specific to the known sequence of the gene of interest. The resultant product is then sequenced and analyzed to confirm that the 5′ end sequence belongs to the desired gene.

### Example 2

### Isolation of Genomic Clones Corresponding to a Polynucleotide

[0459] A human genomic P1 library (Genomic Systems, Inc.) is screened by PCR using primers selected for the cDNA sequence corresponding to SEQ ID NO:X., according to the method described in Example 1. (See also, Sambrook.)

### Example 3

### Tissue Distribution of Polypeptide

[0460] Tissue distribution of mRNA expression of polynucleotides of the present invention is determined using protocols for Northern blot analysis, described by, among others, Sambrook et al. For example, a cDNA probe produced by the method described in Example 1 is labeled with P³² using the REDIPRIME™ DNA labeling system (Amersham Life Science), according to manufacturer's instructions. After labeling, the probe is purified using CHROMA SPIN-100™ column (CLONTECH™ Laboratories, Inc.), according to manufacturer's protocol number PT1200-1. The purified labeled probe is then used to examine various human tissues for mRNA expression.

[0461] Multiple Tissue Northern (MTN) blots containing various human tissues (H) or human immune system tissues (IM) (CLONTECH™) are examined with the labeled probe using EXPRESSHYB™ hybridization solution (CLONTECH™) according to manufacturer's protocol number PT1190-1. Following hybridization and washing, the blots are mounted and exposed to film at −70° C. overnight, and the films developed according to standard procedures.

### Example 4

### Chromosomal Mapping of the Polynucleotides

[0462] An oligonucleotide primer set is designed according to the sequence at the 5′ end of SEQ ID NO:X. This primer preferably spans about 100 nucleotides. This primer set is then used in a polymerase chain reaction under the following set of conditions: 30 seconds, 95° C.; 1 minute, 56° C.; 1 minute, 70° C. This cycle is repeated 32 times followed by one 5 minute cycle at 70° C. Human, mouse, and hamster DNA is used as template in addition to a somatic cell hybrid panel containing individual chromosomes or chromosome fragments (Bios, Inc). The reactions is analyzed on either 8% polyacrylamide gels or 3.5% agarose gels. Chromosome mapping is determined by the presence of an approximately 100 bp PCR fragment in the particular somatic cell hybrid.

### Example 5

### Bacterial Expression of a Polypeptide

[0463] A polynucleotide encoding a polypeptide of the present invention is amplified using PCR oligonucleotide primers corresponding to the 5′ and 3′ ends of the DNA sequence, as outlined in Example 1, to synthesize insertion fragments. The primers used to amplify the cDNA insert should preferably contain restriction sites, such as BamHI and XbaI, at the 5′ end of the primers in order to clone the amplified product into the expression vector. For example, BamHI and XbaI correspond to the restriction enzyme sites on the bacterial expression vector pQE-9. (Qiagen, Inc., Chatsworth, Calif.). This plasmid vector encodes antibiotic resistance (Amp^{r}), a bacterial origin of replication (ori), an IPTG-regulatable promoter/operator (P/O), a ribosome binding site (RBS), a 6-histidine tag (6-His), and restriction enzyme cloning sites.

[0464] The pQE-9 vector is digested with BamHI and XbaI and the amplified fragment is ligated into the pQE-9 vector maintaining the reading frame initiated at the bacterial RBS. The ligation mixture is then used to transform the E. coli strain M15/rep4 (Qiagen, Inc.) which contains multiple copies of the plasmid pREP4, which expresses the lad repressor and also confers kanamycin resistance (Kan^{r}). Transformants are identified by their ability to grow on LB plates and ampicillin/kanamycin resistant colonies are selected. Plasmid DNA is isolated and confirmed by restriction analysis.

[0465] Clones containing the desired constructs are grown overnight (O/N) in liquid culture in LB media supplemented with both Amp (100 ug/ml) and Kan (25 ug/ml). The O/N culture is used to inoculate a large culture at a ratio of 1:100 to 1:250. The cells are grown to an optical density 600 (O.D.⁶⁰⁰) of between 0.4 and 0.6. IPTG (Isopropyl-B-D-thiogalacto pyranoside) is then added to a final concentration of 1 mM. IPTG induces by inactivating the lad repressor, clearing the P/O leading to increased gene expression.

[0466] Cells are grown for an extra 3 to 4 hours. Cells are then harvested by centrifugation (20 mins at 6000×g). The cell pellet is solubilized in the chaotropic agent 6 Molar Guanidine HCl by stirring for 3-4 hours at 4° C. The cell debris is removed by centrifugation, and the supernatant containing the polypeptide is loaded onto a nickel-nitrilo-tri-acetic acid (“Ni-NTA”) affinity resin column (available from QIAGEN, Inc., supra). Proteins with a 6×His tag bind to the Ni-NTA resin with high affinity and can be purified in a simple one-step procedure (for details see: The QIAexpressionist (1995) QIAGEN, Inc., supra).

[0467] Briefly, the supernatant is loaded onto the column in 6 M guanidine-HCl, pH 8, the column is first washed with 10 volumes of 6 M guanidine-HCl, pH 8, then washed with 10 volumes of 6 M guanidine-HCl pH 6, and finally the polypeptide is eluted with 6 M guanidine-HCl, pH 5.

[0468] The purified protein is then renatured by dialyzing it against phosphate-buffered saline (PBS) or 50 mM Na-acetate, pH 6 buffer plus 200 mM NaCl. Alternatively, the protein can be successfully refolded while immobilized on the Ni-NTA column. The recommended conditions are as follows: renature using a linear 6M-IM urea gradient in 500 mM NaCl, 20% glycerol, 20 mM Tris/HCl pH 7.4, containing protease inhibitors. The renaturation should be performed over a period of 1.5 hours or more. After renaturation the proteins are eluted by the addition of 250 mM immidazole. Immidazole is removed by a final dialyzing step against PBS or 50 mM sodium acetate pH 6 buffer plus 200 mM NaCl. The purified protein is stored at 4° C. or frozen at −80° C.

[0469] In addition to the above expression vector, the present invention further includes an expression vector comprising phage operator and promoter elements operatively linked to a polynucleotide of the present invention, called pHE4a. (ATCC™ Accession Number 209645, deposited on Feb. 25, 1998.) This vector contains: 1) a neomycinphosphotransferase gene as a selection marker, 2) an E. coli origin of replication, 3) a T5 phage promoter sequence, 4) two lac operator sequences, 5) a Shine-Delgarno sequence, and 6) the lactose operon repressor gene (lacIq). The origin of replication (oriC) is derived from pUC19 (LTI, Gaithersburg, Md.). The promoter sequence and operator sequences are made synthetically.

[0470] DNA can be inserted into the pHEa by restricting the vector with NdeI and XbaI, BamHI, XhoI, or Asp718, running the restricted product on a gel, and isolating the larger fragment (the stuffer fragment should be about 310 base pairs). The DNA insert is generated according to the PCR protocol described in Example 1, using PCR primers having restriction sites for NdeI (5′ primer) and XbaI, BamHI, XhoI, or Asp718 (3′ primer). The PCR insert is gel purified and restricted with compatible enzymes. The insert and vector are ligated according to standard protocols.

[0471] The engineered vector could easily be substituted in the above protocol to express protein in a bacterial system.

### Example 6

### Purification of a Polypeptide from an Inclusion Body

[0472] The following alternative method can be used to purify a polypeptide expressed in E coli when it is present in the form of inclusion bodies. Unless otherwise specified, all of the following steps are conducted at 4-10° C.

[0473] Upon completion of the production phase of the E. coli fermentation, the cell culture is cooled to 4-10° C. and the cells harvested by continuous centrifugation at 15,000 rpm (Heraeus Sepatech). On the basis of the expected yield of protein per unit weight of cell paste and the amount of purified protein required, an appropriate amount of cell paste, by weight, is suspended in a buffer solution containing 100 mM Tris, 50 mM EDTA, pH 7.4. The cells are dispersed to a homogeneous suspension using a high shear mixer.

[0474] The cells are then lysed by passing the solution through a microfluidizer (Microfuidics, Corp. or APV Gaulin, Inc.) twice at 4000-6000 psi. The homogenate is then mixed with NaCl solution to a final concentration of 0.5 M NaCl, followed by centrifugation at 7000×g for 15 mm. The resultant pellet is washed again using 0.5M NaCl, 100 mM Tris, 50 mM EDTA, pH 7.4.

[0475] The resulting washed inclusion bodies are solubilized with 1.5 M guanidine hydrochloride (GuHCl) for 2-4 hours. After 7000×g centrifugation for 15 min., the pellet is discarded and the polypeptide containing supernatant is incubated at 4° C. overnight to allow further GuHCl extraction.

[0476] Following high speed centrifugation (30,000×g) to remove insoluble particles, the GuHCl solubilized protein is refolded by quickly mixing the GuHCl extract with 20 volumes of buffer containing 50 mM sodium, pH 4.5, 150 mM NaCl, 2 mM EDTA by vigorous stirring. The refolded diluted protein solution is kept at 4° C. without mixing for 12 hours prior to further purification steps.

[0477] To clarify the refolded polypeptide solution, a previously prepared tangential filtration unit equipped with 0.16 lam membrane filter with appropriate surface area (e.g., Filtron), equilibrated with 40 mM sodium acetate, pH 6.0 is employed. The filtered sample is loaded onto a cation exchange resin (e.g., Poros HS-50, Perseptive Biosystems). The column is washed with 40 mM sodium acetate, pH 6.0 and eluted with 250 mM, 500 mM, 1000 mM, and 1500 mM NaCl in the same buffer, in a stepwise manner. The absorbance at 280 nm of the effluent is continuously monitored. Fractions are collected and further analyzed by SDS-PAGE.

[0478] Fractions containing the polypeptide are then pooled and mixed with 4 volumes of water. The diluted sample is then loaded onto a previously prepared set of tandem columns of strong anion (Poros HQ-50, Perseptive Biosystems) and weak anion (Poros CM-20, Perseptive Biosystems) exchange resins. The columns are equilibrated with 40 mM sodium acetate, pH 6.0. Both columns are washed with 40 mM sodium acetate, pH 6.0, 200 mM NaCl. The CM-20 column is then eluted using a 10 column volume linear gradient ranging from 0.2 M NaCl, 50 mM sodium acetate, pH 6.0 to 1.0 M NaCl, 50 mM sodium acetate, pH 6.5. Fractions are collected under constant A₂₈₀ monitoring of the effluent. Fractions containing the polypeptide (determined, for instance, by 16% SDS-PAGE) are then pooled.

[0479] The resultant polypeptide should exhibit greater than 95% purity after the above refolding and purification steps. No major contaminant bands should be observed from Commassie blue stained 16% SDS-PAGE gel when 5 μg of purified protein is loaded. The purified protein can also be tested for endotoxin/LPS contamination, and typically the LPS content is less than 0.1 ng/ml according to LAL assays.

### Example 7

### Cloning and Expression of a Polypeptide in a Baculovirus Expression System

[0480] In this example, the plasmid shuttle vector pA2 is used to insert a polynucleotide into a baculovirus to express a polypeptide. This expression vector contains the strong polyhedrin promoter of the Autographa californica nuclear polyhedrosis virus (AcMNPV) followed by convenient restriction sites such as BamHI, Xba I and Asp718. The polyadenylation site of the simian virus 40 (“SV40”) is used for efficient polyadenylation. For easy selection of recombinant virus, the plasmid contains the beta-galactosidase gene from E. coli under control of a weak Drosophila promoter in the same orientation, followed by the polyadenylation signal of the polyhedrin gene. The inserted genes are flanked on both sides by viral sequences for cell-mediated homologous recombination with wild-type viral DNA to generate a viable virus that express the cloned polynucleotide.

[0481] Many other baculovirus vectors can be used in place of the vector above, such as pAc373, pVL941, and pAcIM1, as one skilled in the art would readily appreciate, as long as the construct provides appropriately located signals for transcription, translation, secretion and the like, including a signal peptide and an in-frame AUG as required. Such vectors are described, for instance, in Luckow et al., Virology 170: 31-39 (1989).

[0482] Specifically, the cDNA sequence contained in the deposited clone, including the AUG initiation codon and the naturally associated leader sequence identified in Table 1, is amplified using the PCR protocol described in Example 1. If the naturally occurring signal sequence is used to produce the secreted protein, the pA2 vector does not need a second signal peptide. Alternatively, the vector can be modified (pA2 GP) to include a baculovirus leader sequence, using the standard methods described in Summers et al., “a Manual of Methods for Baculovirus Vectors and Insect Cell Culture Procedures,” Texas Agricultural Experimental Station Bulletin No. 1555 (1987).

[0483] The amplified fragment is isolated from a 1% agarose gel using a commercially available kit (“GENECLEAN™,” BIO 101 Inc., La Jolla, Calif.). The fragment then is digested with appropriate restriction enzymes and again purified on a 1% agarose gel.

[0484] The plasmid is digested with the corresponding restriction enzymes and optionally, can be dephosphorylated using calf intestinal phosphatase, using routine procedures known in the art. The DNA is then isolated from a 1% agarose gel using a commercially available kit (“GENECLEAN™” BIO 101 Inc., La Jolla, Calif.).

[0485] The fragment and the dephosphorylated plasmid are ligated together with T4 DNA ligase. E. coli HB101 or other suitable E coli hosts such as XL-1 Blue (Stratagene Cloning Systems, La Jolla, Calif.) cells are transformed with the ligation mixture and spread on culture plates. Bacteria containing the plasmid are identified by digesting DNA from individual colonies and analyzing the digestion product by gel electrophoresis. The sequence of the cloned fragment is confirmed by DNA sequencing.

[0486] Five μg of a plasmid containing the polynucleotide is co-transfected with 1.0 μg of a commercially available linearized baculovirus DNA (“BACULOGOLD™ baculovirus DNA”, Pharmingen, San Diego, Calif.), using the lipofection method described by Felgner et al., Proc. Natl. Acad. Sci. USA 84: 7413-7417 (1987). One μg of BACULOGOLD™ virus DNA and 5 μg of the plasmid are mixed in a sterile well of a microtiter plate containing 50 μl of serum-free Grace's medium (Life Technologies Inc., Gaithersburg, Md.). Afterwards, 10 μl LIPOFECTIN™ plus 90 μl Grace's medium are added, mixed and incubated for 15 minutes at room temperature. Then the transfection mixture is added drop-wise to Sf9 insect cells (ATCC™ CRL 1711) seeded in a 35 mm tissue culture plate with 1 mil Grace's medium without serum. The plate is then incubated for 5 hours at 27° C. The transfection solution is then removed from the plate and 1 ml of Grace's insect medium supplemented with 10% fetal calf serum is added. Cultivation is then continued at 27° C. for four days.

[0487] After four days the supernatant is collected and a plaque assay is performed, as described by Summers and Smith, supra. An agarose gel with “Blue Gal” (Life Technologies Inc., Gaithersburg) is used to allow easy identification and isolation of gal-expressing clones, which produce blue-stained plaques. (a detailed description of a “plaque assay” of this type can also be found in the user's guide for insect cell culture and baculovirology distributed by Life Technologies Inc., Gaithersburg, page 9-10.) After appropriate incubation, blue stained plaques are picked with the tip of a micropipettor (e.g., Eppendorf). The agar containing the recombinant viruses is then resuspended in a microcentrifuge tube containing 200 μl of Grace's medium and the suspension containing the recombinant baculovirus is used to infect Sf9 cells seeded in 35 mm dishes. Four days later the supernatants of these culture dishes are harvested and then they are stored at 4° C.

[0488] To verify the expression of the polypeptide, Sf9 cells are grown in Grace's medium supplemented with 10% heat-inactivated FBS. The cells are infected with the recombinant baculovirus containing the polynucleotide at a multiplicity of infection (“MOI”) of about 2. If radiolabeled proteins are desired, 6 hours later the medium is removed and is replaced with SF900 II medium minus methionine and cysteine (available from Life Technologies Inc., Rockville, Md.). After 42 hours, 5 μCi of ³⁵S-methionine and 5 μCi ³⁵S-cysteine (available from Amersham) are added. The cells are further incubated for 16 hours and then are harvested by centrifugation. The proteins in the supernatant as well as the intracellular proteins are analyzed by SDS-PAGE followed by autoradiography (if radiolabeled).

[0489] Microsequencing of the amino acid sequence of the amino terminus of purified protein may be used to determine the amino terminal sequence of the produced protein.

### Example 8

### Expression of a Polypeptide in Mammalian Cells

[0490] The polypeptide of the present invention can be expressed in a mammalian cell. a typical mammalian expression vector contains a promoter element, which mediates the initiation of transcription of mRNA, a protein coding sequence, and signals required for the termination of transcription and polyadenylation of the transcript. Additional elements include enhancers, Kozak sequences and intervening sequences flanked by donor and acceptor sites for RNA splicing. Highly efficient transcription is achieved with the early and late promoters from SV40, the long terminal repeats (LTRs) from Retroviruses, e.g., RSV, HTLVI, HIVI and the early promoter of the cytomegalovirus (CMV). However, cellular elements can also be used (e.g., the human actin promoter).

[0491] Suitable expression vectors for use in practicing the present invention include, for example, vectors such as pSVL and pMSG (PHARMACIA™, Uppsala, Sweden), pRSVcat (ATCC™ 37152), pSV2dhfr (ATCC™ 37146), pBC12MI (ATCC™ 67109), pCMVSport 2.0, and pCMVSport 3.0. Mammalian host cells that could be used include, human Hela, 293, H9 and Jurkat cells, mouse NIH3T3 and C127 cells, Cos 1, Cos 7 and CV1, quail QC1-3 cells, mouse L cells and Chinese hamster ovary (CHO) cells.

[0492] Alternatively, the polypeptide can be expressed in stable cell lines containing the polynucleotide integrated into a chromosome. The co-transfection with a selectable marker such as dhfr, gpt, neomycin, hygromycin allows the identification and isolation of the transfected cells.

[0493] The transfected gene can also be amplified to express large amounts of the encoded protein. The DHFR (dihydrofolate reductase) marker is useful in developing cell lines that carry several hundred or even several thousand copies of the gene of interest. (See, e.g., Alt, F. W., et al., J. Biol. Chem. 253: 1357-1370 (1978); Hamlin, J. L. and Ma, C., Biochem. et Biophys. Acta, 1097: 107-143 (1990); Page, M. J. and Sydenham, M. a., Biotechnology 9: 64-68 (1991).) Another useful selection marker is the enzyme glutamine synthase (GS) (Murphy et al., Biochem J. 227: 277-279 (1991); Bebbington et al., Bio/Technology 10: 169-175 (1992). Using these markers, the mammalian cells are grown in selective medium and the cells with the highest resistance are selected. These cell lines contain the amplified gene(s) integrated into a chromosome. Chinese hamster ovary (CHO) and NSO cells are often used for the production of proteins.

[0494] Derivatives of the plasmid pSV2-dhfr (ATCC™ Accession No. 37146), the expression vectors pC4 (ATCC™ Accession No. 209646) and pC6 (ATCC™ Accession No. 209647) contain the strong promoter (LTR) of the Rous Sarcoma Virus (Cullen et al., Molecular and Cellular Biology, 438447 (March, 1985)) plus a fragment of the CMV-enhancer (Boshart et al., Cell 41: 521-530 (1985).) Multiple cloning sites, e.g., with the restriction enzyme cleavage sites BamHI, XbaI and Asp718, facilitate the cloning of the gene of interest. The vectors also contain the 3′ intron, the polyadenylation and termination signal of the rat preproinsulin gene, and the mouse DHFR gene under control of the SV40 early promoter.

[0495] Specifically, the plasmid pC6, for example, is digested with appropriate restriction enzymes and then dephosphorylated using calf intestinal phosphates by procedures known in the art. The vector is then isolated from a 1% agarose gel.

[0496] A polynucleotide of the present invention is amplified according to the protocol outlined in Example 1. If the naturally occurring signal sequence is used to produce the secreted protein, the vector does not need a second signal peptide. Alternatively, if the naturally occurring signal sequence is not used, the vector can be modified to include a heterologous signal sequence. (See, e.g., WO 96/34891.)

[0497] The amplified fragment is isolated from a 1% agarose gel using a commercially available kit (“GENECLEAN™,” BIO 101 Inc., La Jolla, Calif.). The fragment then is digested with appropriate restriction enzymes and again purified on a 1% agarose gel.

[0498] The amplified fragment is then digested with the same restriction enzyme and purified on a 1% agarose gel. The isolated fragment and the dephosphorylated vector are then ligated with T4 DNA ligase. E. coli HB101 or XL-1 Blue cells are then transformed and bacteria are identified that contain the fragment inserted into plasmid pC6 using, for instance, restriction enzyme analysis.

[0499] Chinese hamster ovary cells lacking an active DHFR gene is used for transfection. Five μg of the expression plasmid pC6 is cotransfected with 0.5 μg of the plasmid pSVneo using LIPOFECTIN™ (Felgner et al., supra). The plasmid pSV2-neo contains a dominant selectable marker, the neo gene from Tn5 encoding an enzyme that confers resistance to a group of antibiotics including G418. The cells are seeded in alpha minus MEM supplemented with 1 mg/ml G418. After 2 days, the cells are trypsinized and seeded in hybridoma cloning plates (Greiner, Germany) in alpha minus MEM supplemented with 10, 25, or 50 ng/ml of metothrexate plus 1 mg/ml G418. After about 10-14 days single clones are trypsinized and then seeded in 6-well petri dishes or 10 ml flasks using different concentrations of methotrexate (50 nM, 100 nM, 200 nM, 400 nM, 800 nM). Clones growing at the highest concentrations of methotrexate are then transferred to new 6-well plates containing even higher concentrations of methotrexate (1 μM, 2 μM, 5 μM, 10 mM, 20 mM). The same procedure is repeated until clones are obtained which grow at a concentration of 100-200 μM. Expression of the desired gene product is analyzed, for instance, by SDS-PAGE and Western blot or by reversed phase HPLC analysis.

### Example 9

### Protein Fusions

[0500] The polypeptides of the present invention are preferably fused to other proteins. These fusion proteins can be used for a variety of applications. For example, fusion of the present polypeptides to His-tag, HA-tag, protein a, IgG domains, and maltose binding protein facilitates purification. (See Example 5; see also EP a 394,827; Traunecker, et al., Nature 331:84-86 (1988).) Similarly, fusion to IgG-1, IgG-3, and albumin increases the halflife time in vivo. Nuclear localization signals fused to the polypeptides of the present invention can target the protein to a specific subcellular localization, while covalent heterodimer or homodimers can increase or decrease the activity of a fusion protein. Fusion proteins can also create chimeric molecules having more than one function. Finally, fusion proteins can increase solubility and/or stability of the fused protein compared to the non-fused protein. All of the types of fusion proteins described above can be made by modifying the following protocol, which outlines the fusion of a polypeptide to an IgG molecule, or the protocol described in Example 5.

[0501] Briefly, the human Fc portion of the IgG molecule can be PCR amplified, using primers that span the 5′ and 3′ ends of the sequence described below. These primers also should have convenient restriction enzyme sites that will facilitate cloning into an expression vector, preferably a mammalian expression vector.

[0502] For example, if pC4 (Accession No. 209646) is used, the human Fc portion can be ligated into the BamHI cloning site. Note that the 3′ BamHI site should be destroyed. Next, the vector containing the human Fc portion is re-restricted with BamHI, linearizing the vector, and a polynucleotide of the present invention, isolated by the PCR protocol described in Example 1, is ligated into this BamHI site. Note that the polynucleotide is cloned without a stop codon, otherwise a fusion protein will not be produced.

[0503] If the naturally occurring signal sequence is used to produce the secreted protein, pC4 does not need a second signal peptide. Alternatively, if the naturally occurring signal sequence is not used, the vector can be modified to include a heterologous signal sequence. (See, e.g., WO 96/34891.)

[0504] Human IgG Fc region:

| | |
|---|---|
| GGGATCCGGAGCCCAAATCTTCTGACAAAACTCACACATGCCCACCGTGCCCAGCACCTGAATTCGAGGGTGCACCGTCAGTCTTC | (SEQ ID NO:1) |
| CTCTTCCCCCCAAAACCCAAGGACACCCTCATGATCTCCCGGACTCCTGAGGTCACATGCGTGGTGGTGGACGTAAGCCACGAAGA | |
| CCCTGAGGTCAAGTTCAACTGGTACGTGGACGGCGTGGAGGTGCATAATGCCAAGACAAAGCCGCGGGAGGAGCAGTACAACAGCA | |
| CGTACCGTGTGGTCAGCGTCCTCACCGTCCTGCACCAGGACTGGCTGAATGGCAAGGAGTACAAGTGCAAGGTCTCCAACAAAGCC | |
| CTCCCAACCCCCATCGAGAAAACCATCTCCAAAGCCAAAGGGCAGCCCCGAGAACCACAGGTGTACACCCTGCCCCCATCCCGGGA | |
| TGAGCTGACCAAGAACCAGGTCAGCCTGACCTGCCTGGTCAAAGGCTTCTATCCAAGCGACATCGCCGTGGAGTGGGAGAGCAATG | |
| GGCAGCCGGAGAACAACTACAAGACCACGCCTCCCGTGCTGGACTCCGACGGCTCCTTCTTCCTCTACAGCAAGCTCACCGTGGAC | |
| AAGAGCAGGTGGCAGCAGGGGAACGTCTTCTCATGCTCCGTGATGCATGAGGCTCTGCACAACCACTACACGCAGAAGAGCCTCTC | |
| CCTGTCTCCGGGTAAATGAGTGCGACGGCCGCGACTCTAGAGGAT | |

### Example 10

### Production of an Antibody from a Polypeptide

[0505] The antibodies of the present invention can be prepared by a variety of methods. (See, Current Protocols, Chapter 2.) For example, cells expressing a polypeptide of the present invention is administered to an animal to induce the production of sera containing polyclonal antibodies. In a preferred method, a preparation of the secreted protein is prepared and purified to render it substantially free of natural contaminants. Such a preparation is then introduced into an animal in order to produce polyclonal antisera of greater specific activity.

[0506] In the most preferred method, the antibodies of the present invention are monoclonal antibodies (or protein binding fragments thereof). Such monoclonal antibodies can be prepared using hybridoma technology. (Köhler et al., Nature 256: 495 (1975); Köhler et al., Eur. J. Immunol. 6: 511 (1976); Köhler et al., Eur. J. Immunol. 6: 292 (1976); Hammerling et al., in: Monoclonal Antibodies and T-Cell Hybridomas, Elsevier, N.Y., pp. 563-681 (1981).) In general, such procedures involve immunizing an animal (preferably a mouse) with polypeptide or, more preferably, with a secreted polypeptide-expressing cell. Such cells may be cultured in any suitable tissue culture medium; however, it is preferable to culture cells in Earle's modified Eagle's medium supplemented with 10% fetal bovine serum (inactivated at about 56° C.), and supplemented with about 10 g/l of nonessential amino acids, about 1,000 U/ml of penicillin, and about 100 μg/ml of streptomycin.

[0507] The splenocytes of such mice are extracted and fused with a suitable myeloma cell line. Any suitable myeloma cell line may be employed in accordance with the present invention; however, it is preferable to employ the parent myeloma cell line (SP20), available from the ATCC™. After fusion, the resulting hybridoma cells are selectively maintained in HAT medium, and then cloned by limiting dilution as described by Wands et al. (Gastroenterology 80: 225-232 (1981).) The hybridoma cells obtained through such a selection are then assayed to identify clones which secrete antibodies capable of binding the polypeptide.

[0508] Alternatively, additional antibodies capable of binding to the polypeptide can be produced in a two-step procedure using anti-idiotypic antibodies. Such a method makes use of the fact that antibodies are themselves antigens, and therefore, it is possible to obtain an antibody which binds to a second antibody. In accordance with this method, protein specific antibodies are used to immunize an animal, preferably a mouse. The splenocytes of such an animal are then used to produce hybridoma cells, and the hybridoma cells are screened to identify clones which produce an antibody whose ability to bind to the protein-specific antibody can be blocked by the polypeptide. Such antibodies comprise anti-idiotypic antibodies to the protein-specific antibody and can be used to immunize an animal to induce formation of further protein-specific antibodies.

[0509] It will be appreciated that Fab and F(ab′)2 and other fragments of the antibodies of the present invention may be used according to the methods disclosed herein. Such fragments are typically produced by proteolytic cleavage, using enzymes such as papain (to produce Fab fragments) or pepsin (to produce F(ab′)2 fragments). Alternatively, secreted protein-binding fragments can be produced through the application of recombinant DNA technology or through synthetic chemistry.

[0510] For in vivo use of antibodies in humans, it may be preferable to use “humanized” chimeric monoclonal antibodies. Such antibodies can be produced using genetic constructs derived from hybridoma cells producing the monoclonal antibodies described above. Methods for producing chimeric antibodies are known in the art. (See, for review, Morrison, Science 229: 1202 (1985); Oi et al., BioTechniques 4: 214 (1986); Cabilly et al., U.S. Pat. No. 4,816,567; Taniguchi et al., EP 171496; Morrison et al., EP 173494; Neuberger et al., WO 8601533; Robinson et al., WO 8702671; Boulianne et al., Nature 312: 643 (1984); Neuberger et al., Nature 314: 268 (1985).)

### Example 11

### Production of Secreted Protein for High-Throughout Screening Assays

[0511] The following protocol produces a supernatant containing a polypeptide to be tested. This supernatant can then be used in the Screening Assays described in Examples 13-20.

[0512] First, dilute Poly-D-Lysine (644 587 Boehringer-Mannheim) stock solution (1 mg/ml in PBS) 1:20 in PBS (w/o calcium or magnesium 17-516F Biowhittaker) for a working solution of 50 ug/ml. Add 200 ul of this solution to each well (24 well plates) and incubate at RT for 20 minutes. Be sure to distribute the solution over each well (note: a 12-channel pipetter may be used with tips on every other channel). Aspirate off the Poly-D-Lysine solution and rinse with 1 ml PBS (Phosphate Buffered Saline). The PBS should remain in the well until just prior to plating the cells and plates may be poly-lysine coated in advance for up to two weeks.

[0513] Plate 293T cells (do not carry cells past P+20) at 2×10⁵ cells/well in 0.5 ml DMEM (Dulbecco's Modified Eagle Medium)(with 4.5 G/L glucose and L-glutamine (12-604F Biowhittaker))/10% heat inactivated FBS (14-503F Biowhittaker)/1× Penstrep(17-602E Biowhittaker). Let the cells grow overnight.

[0514] The next day, mix together in a sterile solution basin: 300 μl Lipofectamine (18324-012 Gibco/BRL) and 5 ml Optimem I (31985070 Gibco/BRL)/96-well plate. With a small volume multi-channel pipetter, aliquot approximately 2 μg of an expression vector containing a polynucleotide insert, produced by the methods described in Examples 8 or 9, into an appropriately labeled 96-well round bottom plate. With a multi-channel pipetter, add 50 μl of the Lipofectamine/Optimem 1 mixture to each well. Pipette up and down gently to mix. Incubate at RT 15-45 minutes. After about 20 minutes, use a multi-channel pipetter to add 1501 ul Optimem I to each well. As a control, one plate of vector DNA lacking an insert should be transfected with each set of transfections.

[0515] Preferably, the transfection should be performed by tag-teaming the following tasks. By tag-teaming, hands on time is cut in half, and the cells do not spend too much time on PBS. First, person a aspirates off the media from four 24-well plates of cells, and then person B rinses each well with 0.5-1 ml PBS. Person a then aspirates off PBS rinse, and person B, using a 12-channel pipetter with tips on every other channel, adds the 200 μl of DNA/Lipofectamine/Optimem I complex to the odd wells first, then to the even wells, to each row on the 24-well plates. Incubate at 37° C. for 6 hours.

[0516] While cells are incubating, prepare appropriate media, either 1% BSA in DMEM with 1× penstrep, or CHO-5 media (116.6 mg/L of CaCl2 (anhyd); 0.00130 mg/L CuSO₄-5H₂O; 0.050 mg/L of Fe(NO₃)₃-9H₂O; 0.417 mg/L of FeSO₄-7H₂O; 311.80 mg/L of Kcl; 28.64 mg/L of MgCl₂; 48.84 mg/L of MgSO₄; 6995.50 mg/L of NaCl; 2400.0 mg/L of NaHCO₃; 62.50 mg/L of NaH₂PO₄—H₂O; 71.02 mg/L of Na₂HPO4; 0.4320 mg/L of ZnSO₄-7H₂O; 0.002 mg/L of Arachidonic Acid; 1.022 mg/L of Cholesterol; 0.070 mg/L of DL-alpha-Tocopherol-Acetate; 0.0520 mg/L of Linoleic Acid; 0.010 mg/L of Linolenic Acid; 0.010 mg/L of Myristic Acid; 0.010 mg/L of Oleic Acid; 0.010 mg/L of Palmitric Acid; 0.010 mg/L of Palmitic Acid; 100 mg/L of Pluronic F-68; 0.010 mg/L of Stearic Acid; 2.20 mg/L of Tween 80; 4551 mg/L of D-Glucose; 130.85 mg/ml of L-Alanine; 147.50 mg/ml of L-Arginine-HCL; 7.50 mg/mil of L-Asparagine-H₂O; 6.65 mg/mil of L-Aspartic Acid; 29.56 mg/ml of L-Cystine-2HCL-H₂O; 31.29 mg/ml of L-Cystine-2HCL; 7.35 mg/ml of L-Glutamic Acid; 365.0 mg/ml of L-Glutamine; 18.75 mg/ml of Glycine; 52.48 mg/ml of L-Histidine-HCL-H₂O; 106.97 mg/ml of L-Isoleucine; 111.45 mg/ml of L-Leucine; 163.75 mg/ml of L-Lysine HCL; 32.34 mg/ml of L-Methionine; 68.48 mg/ml of L-Phenylalainine; 40.0 mg/ml of L-Proline; 26.25 mg/ml of L-Serine; 101.05 mg/ml of L-Threonine; 19.22 mg/ml of L-Tryptophan; 91.79 mg/ml of L-Tryrosine-2Na-2H₂O; 99.65 mg/ml of L-Valine; 0.0035 mg/L of Biotin; 3.24 mg/L of D-Ca Pantothenate; 11.78 mg/L of Choline Chloride; 4.65 mg/L of Folic Acid; 15.60 mg/L of i-Inositol; 3.02 mg/L of Niacinamide; 3.00 mg/L of Pyridoxal HCL; 0.031 mg/L of Pyridoxine HCL; 0.319 mg/L of Riboflavin; 3.17 mg/L of Thiamine HCL; 0.365 mg/L of Thymidine; and 0.680 mg/L of Vitamin B₁₂; 25 mM of HEPES Buffer; 2.39 mg/L of Na Hypoxanthine; 0.105 mg/L of Lipoic Acid; 0.081 mg/L of Sodium Putrescine-2HCL; 55.0 mg/L of Sodium Pyruvate; 0.0067 mg/L of Sodium Selenite; 20 μM of Ethanolamine; 0.122 mg/L of Ferric Citrate; 41.70 mg/L of Methyl-B-Cyclodextrin complexed with Linoleic Acid; 33.33 mg/L of Methyl-B-Cyclodextrin complexed with Oleic Acid; and 10 mg/L of Methyl-B-Cyclodextrin complexed with Retinal) with 2 mm glutamine and 1× penstrep. (BSA (81-068-3 Bayer) 100 gm dissolved in IL DMEM for a 10% BSA stock solution). Filter the media and collect 50 μl for endotoxin assay in 15 ml polystyrene conical.

[0517] The transfection reaction is terminated, preferably by tag-teaming, at the end of the incubation period. Person a aspirates off the transfection media, while person B adds 1.5 ml appropriate media to each well. Incubate at 37° C. for 45 or 72 hours depending on the media used: 1% BSA for 45 hours or CHO-5 for 72 hours.

[0518] On day four, using a 300 μl multichannel pipetter, aliquot 600 μl in one 1 ml deep well plate and the remaining supernatant into a 2 ml deep well. The supernatants from each well can then be used in the assays described in Examples 13-20.

[0519] It is specifically understood that when activity is obtained in any of the assays described below using a supernatant, the activity originates from either the polypeptide directly (e.g., as a secreted protein) or by the polypeptide inducing expression of other proteins, which are then secreted into the supernatant. Thus, the invention further provides a method of identifying the protein in the supernatant characterized by an activity in a particular assay.

### Example 12

### Construction of GAS Reporter Construct

[0520] One signal transduction pathway involved in the differentiation and proliferation of cells is called the Jaks-STATs pathway. Activated proteins in the Jaks-STATs pathway bind to gamma activation site “GAS” elements or interferon-sensitive responsive element (“ISRE”), located in the promoter of many genes. The binding of a protein to these elements alter the expression of the associated gene.

[0521] GAS and ISRE elements are recognized by a class of transcription factors called Signal Transducers and Activators of Transcription, or “STATs.” There are six members of the STATs family. Stat1 and Stat3 are present in many cell types, as is Stat2 (as response to IFN-alpha is widespread). Stat4 is more restricted and is not in many cell types though it has been found in T helper class 1, cells after treatment with IL-12. Stat5 was originally called mammary growth factor, but has been found at higher concentrations in other cells including myeloid cells. It can be activated in tissue culture cells by many cytokines.

[0522] The STATs are activated to translocate from the cytoplasm to the nucleus upon tyrosine phosphorylation by a set of kinases known as the Janus Kinase (“Jaks”) family. Jaks represent a distinct family of soluble tyrosine kinases and include Tyk2, Jak1, Jak2, and Jak3. These kinases display significant sequence similarity and are generally catalytically inactive in resting cells.

[0523] The Jaks are activated by a wide range of receptors summarized in the Table below. (Adapted from review by Schidler and Darnell, Ann. Rev. Biochem. 64: 621-51 (1995).) a cytokine receptor family, capable of activating Jaks, is divided into two groups: (a) Class 1 includes receptors for IL-2, IL-3, IL-4, IL-6, IL-7, IL-9, IL-11, IL-12, IL-15, Epo, PRL, GH, G-CSF, GM-CSF, LIF, CNTF, and thrombopoietin; and (b) Class 2 includes IFN-a, IFN-g, and IL-10. The Class 1 receptors share a conserved cysteine motif (a set of four conserved cysteines and one tryptophan) and a WSXWS motif (a membrane proxial region encoding Trp-Ser-Xxx-Trp-Ser (SEQ ID NO:2)).

[0524] Thus, on binding of a ligand to a receptor, Jaks are activated, which in turn activate STATs, which then translocate and bind to GAS elements. This entire process is encompassed in the Jaks-STATs signal transduction pathway.

[0525] Therefore, activation of the Jaks-STATs pathway, reflected by the binding of the GAS or the ISRE element, can be used to indicate proteins involved in the proliferation and differentiation of cells. For example, growth factors and cytokines are known to activate the Jaks-STATs pathway. (See Table below.) Thus, by using GAS elements linked to reporter molecules, activators of the Jaks-STATs pathway can be identified.

| | JAKs | | | | | |
|---|---|---|---|---|---|---|
| Ligand | tyk2 | Jak1 | Jak2 | Jak3 | STATS | GAS(elements) or ISRE |
| IFN family | | | | | | |
| IFN-a/B | + | + | − | − | 1, 2, 3 | ISRE |
| IFN-g | | + | + | − | 1 | GAS (IRF1 > Lys6 > IFP) |
| Il-10 | + | ? | ? | − | 1, 3 | |
| gp130 family | | | | | | |
| IL-6 (Pleiotrohic)+ | + | + | ? | 1, 3 | | GAS (IRF1 > Lys6 > IFP) |
| Il-11(Pleiotrohic)? | + | ? | ? | 1, 3 | | |
| OnM(Pleiotrohic)? | + | + | ? | 1, 3 | | |
| LIF(Pleiotrohic) ? | + | + | ? | 1, 3 | | |
| CNTF(Pleiotrohic) | −/+ | + | + | ? | 1, 3 | |
| G-CSF(Pleiotrohic) | ? | + | ? | ? | 1, 3 | |
| IL-12(Pleiotrohic) | + | − | + | + | 1, 3 | |
| g-C family | | | | | | |
| IL-2 (lymphocytes) | − | + | − | + | 1, 3, 5 | GAS |
| IL-4 (lymph/myeloid) | − | + | − | + | 6 | GAS (IRF1 = IFP >> Ly6)(IgH) |
| IL-7 (lymphocytes) | − | + | − | + | 5 | GAS |
| IL-9 (lymphocytes) | − | + | − | + | 5 | GAS |
| IL-13 (lymphocyte) | − | + | ? | ? | 6 | GAS |
| IL-15 | ? | + | ? | + | 5 | GAS |
| gp140 family | | | | | | |
| IL-3 (myeloid) | − | − | + | − | 5 | GAS (IRF1 > IFP >> Ly6) |
| IL-5 (myeloid) | − | − | + | − | 5 | GAS |
| GM-CSF (myeloid) | − | − | + | − | 5 | GAS |
| Growth hormone family | | | | | | |
| GH | ? | − | + | − | 5 | |
| PRL | ? | +/− | + | − | 1, 3, 5 | |
| EPO | ? | − | + | − | 5 | GAS(B-CAS > IRF1 = IFP >> Ly6) |
| Receptor Tyrosine Kinases | | | | | | |
| EGF | ? | + | + | − | 1, 3 | GAS (IRF1) |
| PDGF | ? | + | + | − | 1, 3 | |
| CSF-1 | ? | + | + | − | 1, 3 | GAS (not IRF1) |

[0526] To construct a synthetic GAS containing promoter element, which is used in the Biological Assays described in Examples 13-14, a PCR based strategy is employed to generate a GAS-SV40 promoter sequence. The 5′ primer contains four tandem copies of the GAS binding site found in the IRF1 promoter and previously demonstrated to bind STATs upon induction with a range of cytokines (Rothman et al., Immunity 1: 457-468 (1994).), although other GAS or ISRE elements can be used instead. The 5′ primer also contains 18 bp of sequence complementary to the SV40 early promoter sequence and is flanked with an XhoI site. The sequence of the 5′ primer is:

(SEQ ID NO:3)

5′:GCGCCTCGAGATTTCCCCGAAATCTAGATTTCCCCGAAATGATTTCCCCGAAATGATTTCCCCGAAATATCTGCCATCTCAATTAG:3′

The downstream primer is complementary to the SV40 promoter and is flanked with a Hind III site: 5′:GCGGCAAGCTTTTTGCAAAGCCTAGGC:3′ (SEQ ID NO:4)

[0527] PCR amplification is performed using the SV40 promoter template present in the B-gal:promoter plasmid obtained from CLONTECH™. The resulting PCR fragment is digested with XhoI/Hind III and subcloned into BLSK2-. (STRATAGENE™.) Sequencing with forward and reverse primers confirms that the insert contains the following sequence:

| | |
|---|---|
| 5′:CTCGAGATTTCCCCGAAATCTAGATTTCCCCGAAATGATTTCCCCCAAATGATTTCCCCGAAATATCTGCCATCTCAATTAGTCAG | (SEQ ID NO:5) |
| CAACCATAGTCCCCCCCCTAACTCCGCCCATCCCGCCCCTAACTCCGCCCAGTTCCGCCCATTCTCCGCCCCATGGCTGACTAATTTTT | |
| TTTATTTATGCAGAGGCCGAGGCCGCCTCGGCCTCTGAGCTATTCCAGAAGTAGTGAGGAGGCTTTTTTGGAGGCCTAGGCTTTTGCAA | |
| AAAGCTT:3′. | |

[0528] With this GAS promoter element linked to the SV40 promoter, a GAS:SEAP2 reporter construct is next engineered. Here, the reporter molecule is a secreted alkaline phosphatase, or “SEAP.” Clearly, however, any reporter molecule can be instead of SEAP, in this or in any of the other Examples. Well known reporter molecules that can be used instead of SEAP include chloramphenicol acetyltransferase (CAT), luciferase, alkaline phosphatase, B-galactosidase, green fluorescent protein (GFP), or any protein detectable by an antibody.

[0529] The above sequence confirmed synthetic GAS-SV40 promoter element is subcloned into the pSEAP-Promoter vector obtained from CLONTECH™ using HindIII and XhoI, effectively replacing the SV40 promoter with the amplified GAS:SV40 promoter element, to create the GAS-SEAP vector. However, this vector does not contain a neomycin resistance gene, and therefore, is not preferred for mammalian expression systems.

[0530] Thus, in order to generate mammalian stable cell lines expressing the GAS-SEAP reporter, the GAS-SEAP cassette is removed from the GAS-SEAP vector using SalI and NotI, and inserted into a backbone vector containing the neomycin resistance gene, such as pGFP-1 (CLONTECH™), using these restriction sites in the multiple cloning site, to create the GAS-SEAP/Neo vector. Once this vector is transfected into mammalian cells, this vector can then be used as a reporter molecule for GAS binding as described in Examples 13-14.

[0531] Other constructs can be made using the above description and replacing GAS with a different promoter sequence. For example, construction of reporter molecules containing NFK-B and EGR promoter sequences are described in Examples 15 and 16. However, many other promoters can be substituted using the protocols described in these Examples. For instance, SRE, IL-2, NFAT, or Osteocalcin promoters can be substituted, alone or in combination (e.g., GAS/NF-κB/EGR, GAS/NF-κB, II-2/NFAT, or NF-κB/GAS). Similarly, other cell lines can be used to test reporter construct activity, such as HELA (epithelial), HUVEC (endothelial), Reh (B-cell), Saos-2 (osteoblast), HUVAC (aortic), or Cardiomyocyte.

### Example 13

### High-Throughput Screening Assay for T-Cell Activity

[0532] The following protocol is used to assess T-cell activity by identifying factors, such as growth factors and cytokines, that may proliferate or differentiate T-cells. T-cell activity is assessed using the GAS/SEAP/Neo construct produced in Example 12. Thus, factors that increase SEAP activity indicate the ability to activate the Jaks-STATS signal transduction pathway. The T-cell used in this assay is Jurkat T-cells (ATCC™ Accession No. TIB-152), although Molt-3 cells (ATCC™ Accession No. CRL-1552) and Molt-4 cells (ATCC™ Accession No. CRL-1582) cells can also be used.

[0533] Jurkat T-cells are lymphoblastic CD4+Th1 helper cells. In order to generate stable cell lines, approximately 2 million Jurkat cells are transfected with the GAS-SEAP/neo vector using DMRIE-C (Life Technologies)(transfection procedure described below). The transfected cells are seeded to a density of approximately 20,000 cells per well and transfectants resistant to 1 mg/ml genticin selected. Resistant colonies are expanded and then tested for their response to increasing concentrations of interferon gamma. The dose response of a selected clone is demonstrated.

[0534] Specifically, the following protocol will yield sufficient cells for 75 wells containing 200 μl of cells. Thus, it is either scaled up, or performed in multiple to generate sufficient cells for multiple 96 well plates. Jurkat cells are maintained in RPMI+10% serum with 1% Pen-Strep. Combine 2.5 mls of OPTI-MEM™ (Life Technologies) with 10 μg of plasmid DNA in a T25 flask. Add 2.5 ml OPTI-MEM™ containing 50 μl of DMRIE-C and incubate at room temperature for 15-45 mins.

[0535] During the incubation period, count cell concentration, spin down the required number of cells (107 per transfection), and resuspend in OPTI-MEM™ to a final concentration of 10⁷ cells/ml. Then add 1 ml of 1×10⁷ cells in OPTI-MEM™ to T25 flask and incubate at 37° C. for 6 hrs. After the incubation, add 10 ml of RPMI+15% serum.

[0536] The Jurkat:GAS-SEAP stable reporter lines are maintained in RPMI+10% serum, 1 mg/ml Genticin, and 1% Pen-Strep. These cells are treated with supernatants containing a polypeptide as produced by the protocol described in Example 11.

[0537] On the day of treatment with the supernatant, the cells should be washed and resuspended in fresh RPMI+10% serum to a density of 500,000 cells per ml. The exact number of cells required will depend on the number of supernatants being screened. For one 96 well plate, approximately 10 million cells (for 10 plates, 100 million cells) are required.

[0538] Transfer the cells to a triangular reservoir boat, in order to dispense the cells into a 96 well dish, using a 12 channel pipette. Using a 12 channel pipette, transfer 200 μl of cells into each well (therefore adding 100,000 cells per well).

[0539] After all the plates have been seeded, 50 μl of the supernatants are transferred directly from the 96 well plate containing the supernatants into each well using a 12 channel pipette. In addition, a dose of exogenous interferon gamma (0.1, 1.0, 10 ng) is added to wells H9, H10, and H11 to serve as additional positive controls for the assay.

[0540] The 96 well dishes containing Jurkat cells treated with supernatants are placed in an incubator for 48 hrs (note: this time is variable between 48-72 hrs). 35 μl samples from each well are then transferred to an opaque 96 well plate using a 12 channel pipette. The opaque plates should be covered (using sellophene covers) and stored at −20° C. until SEAP assays are performed according to Example 17. The plates containing the remaining treated cells are placed at 4° C. and serve as a source of material for repeating the assay on a specific well if desired.

[0541] As a positive control, 100 Unit/ml interferon gamma can be used which is known to activate Jurkat T cells. Over 30 fold induction is typically observed in the positive control wells.

### Example 14

### High-Throughput Screening Assay Identifying Myeloid Activity

[0542] The following protocol is used to assess myeloid activity by identifying factors, such as growth factors and cytokines, that may proliferate or differentiate myeloid cells. Myeloid cell activity is assessed using the GAS/SEAP/Neo construct produced in Example 12. Thus, factors that increase SEAP activity indicate the ability to activate the Jaks-STATS signal transduction pathway. The myeloid cell used in this assay is U937, a pre-monocyte cell line, although TF-1, HL60, or KG1 can be used.

[0543] To transiently transfect U937 cells with the GAS/SEAP/Neo construct produced in Example 12, a DEAE-Dextran method (Kharbanda et. al., 1994, Cell Growth & Differentiation, 5: 259-265) is used. First, harvest 2×10e⁷ U937 cells and wash with PBS. The U937 cells are usually grown in RPMI 1640 medium containing 10% heat-inactivated fetal bovine serum (FBS) supplemented with 100 units/ml penicillin and 100 mg/ml streptomycin.

[0544] Next, suspend the cells in 1 ml of 20 mM Tris-HCl (pH 7.4) buffer containing 0.5 mg/ml DEAE-Dextran, 8 μg GAS-SEAP2 plasmid DNA, 140 mM NaCl, 5 mM KCl, 375 μM Na₂HPO₄.7H₂₀, 1 mM MgCl₂, and 675 μM CaCl₂. Incubate at 37° C. for 45 min.

[0545] Wash the cells with RPMI 1640 medium containing 10% FBS and then resuspend in 10 ml complete medium and incubate at 37° C. for 36 hr.

[0546] The GAS-SEAP/U937 stable cells are obtained by growing the cells in 400 μg/ml G418. The G418-free medium is used for routine growth but every one to two months, the cells should be re-grown in 400 μg/ml G418 for couple of passages.

[0547] These cells are tested by harvesting 1×10⁸ cells (this is enough for ten 96-well plates assay) and wash with PBS. Suspend the cells in 200 ml above described growth medium, with a final density of 5×10⁵ cells/ml. Plate 200 μl cells per well in the 96-well plate (or 1×10⁵ cells/well).

[0548] Add 50 μl of the supernatant prepared by the protocol described in Example 11. Incubate at 37° C. for 48 to 72 hr. As a positive control, 100 Unit/ml interferon gamma can be used which is known to activate U937 cells. Over 30 fold induction is typically observed in the positive control wells. SEAP assay the supernatant according to the protocol described in Example 17.

### Example 15

### High-Throughput Screening Assay Identifying Neuronal Activity

[0549] When cells undergo differentiation and proliferation, a group of genes are activated through many different signal transduction pathways. One of these genes, EGR1 (early growth response gene 1), is induced in various tissues and cell types upon activation. The promoter of EGR1 is responsible for such induction. Using the EGR1 promoter linked to reporter molecules, activation of cells can be assessed.

[0550] Particularly, the following protocol is used to assess neuronal activity in PC12 cell lines. PC12 cells (rat phenochromocytoma cells) are known to proliferate and/or differentiate by activation with a number of mitogens, such as TPA (tetradecanoyl phorbol acetate), NGF (nerve growth factor), and EGF (epidermal growth factor). The EGR1 gene expression is activated during this treatment. Thus, by stably transfecting PC12 cells with a construct containing an EGR promoter linked to SEAP reporter, activation of PC12 cells can be assessed.

[0551] The EGR/SEAP reporter construct can be assembled by the following protocol. The EGR-1 promoter sequence (−633 to +1)(Sakamoto K et al., Oncogene 6: 867-871 (1991)) can be PCR amplified from human genomic DNA using the following primers:

(SEQ ID NO:6)

5′ GCGCTCGAGGGATGACAGCGATAGAACCCCGG-3′

(SEQ ID NO:7)

5′ GCGAAGCTTCGCGACTCCCCGGATCCGCCTC-3′

[0552] Using the GAS:SEAP/Neo vector produced in Example 12, EGR1 amplified product can then be inserted into this vector. Linearize the GAS:SEAP/Neo vector using restriction enzymes XhoI/HindIII, removing the GAS/SV40 stuffer. Restrict the EGR1 amplified product with these same enzymes. Ligate the vector and the EGR1 promoter.

[0553] To prepare 96 well-plates for cell culture, two mls of a coating solution (1:30 dilution of collagen type I (Upstate Biotech Inc. Cat#08-115) in 30% ethanol (filter sterilized)) is added per one 10 cm plate or 50 ml per well of the 96-well plate, and allowed to air dry for 2 hr.

[0554] PC12 cells are routinely grown in RPMI-1640 medium (Bio Whittaker) containing 10% horse serum (JRH BIOSCIENCES, Cat. # 12449-78P), 5% heat-inactivated fetal bovine serum (FBS) supplemented with 100 units/ml penicillin and 100 μg/ml streptomycin on a precoated 10 cm tissue culture dish. One to four split is done every three to four days. Cells are removed from the plates by scraping and resuspended with pipetting up and down for more than 15 times.

[0555] Transfect the EGR/SEAP/Neo construct into PC12 using the Lipofectamine protocol described in Example 11. EGR-SEAP/PC12 stable cells are obtained by growing the cells in 300 μg/ml G418. The G418-free medium is used for routine growth but every one to two months, the cells should be re-grown in 300 μg/ml G418 for couple of passages.

[0556] To assay for neuronal activity, a 10 cm plate with cells around 70 to 80% confluent is screened by removing the old medium. Wash the cells once with PBS (Phosphate buffered saline). Then starve the cells in low serum medium (RPMI-1640 containing 1% horse serum and 0.5% FBS with antibiotics) overnight.

[0557] The next morning, remove the medium and wash the cells with PBS. Scrape off the cells from the plate, suspend the cells well in 2 ml low serum medium. Count the cell number and add more low serum medium to reach final cell density as 5×10⁵ cells/ml.

[0558] Add 200 μl of the cell suspension to each well of 96-well plate (equivalent to 1×10⁵ cells/well). Add 50 μl supernatant produced by Example 11, 37° C. for 48 to 72 hr. As a positive control, a growth factor known to activate PC12 cells through EGR can be used, such as 50 ng/μl of Neuronal Growth Factor (NGF). Over fifty-fold induction of SEAP is typically seen in the positive control wells. SEAP assay the supernatant according to Example 17.

### Example 16

### High-Throughput Screening Assay for T-Cell Activity

[0559] NF-κB (Nuclear Factor κB) is a transcription factor activated by a wide variety of agents including the inflammatory cytokines IL-1 and TNF, CD30 and CD40, lymphotoxin-alpha and lymphotoxin-beta, by exposure to LPS or thrombin, and by expression of certain viral gene products. As a transcription factor, NF-κB regulates the expression of genes involved in immune cell activation, control of apoptosis (NF-κB appears to shield cells from apoptosis), B and T-cell development, anti-viral and antimicrobial responses, and multiple stress responses.

[0560] In non-stimulated conditions, NF-κB is retained in the cytoplasm with I-κB (Inhibitor κB). However, upon stimulation, I-κB is phosphorylated and degraded, causing NF-κB to shuttle to the nucleus, thereby activating transcription of target genes. Target genes activated by NF-κB include IL-2, IL-6, GM-CSF, ICAM-1 and class 1 MHC.

[0561] Due to its central role and ability to respond to a range of stimuli, reporter constructs utilizing the NF-κB promoter element are used to screen the supernatants produced in Example 11. Activators or inhibitors of NF-κB would be useful in treating diseases. For example, inhibitors of NF-κB could be used to treat those diseases related to the acute or chronic activation of NF-κB, such as rheumatoid arthritis.

[0562] To construct a vector containing the NF-κB promoter element, a PCR based strategy is employed. The upstream primer contains four tandem copies of the NF-κB binding site (GGGGACTTTCCC) (SEQ ID NO:8), 18 bp of sequence complementary to the 5′ end of the SV40 early promoter sequence, and is flanked with an XhoI site:

| | |
|---|---|
| 5′:GCGGCCTCGAGGGGACTTTCCCGGGGACTTTCCGGGGACTTTCCGGGACTTTCCATCCTGCCATCTCAATTAG:3′ | (SEQ ID NO:9) |

The downstream primer is complementary to the 3′ end of the SV40 promoter and is flanked with a Hind III site: 5′:GCGGCAAGCTTTTTGCAAAGCCTAGGC:3′ (SEQ ID NO:4)

[0563] PCR amplification is performed using the SV40 promoter template present in the pB-gal:promoter plasmid obtained from CLONTECH™. The resulting PCR fragment is digested with XhoI and Hind III and subcloned into BLSK2-. (STRATAGENE™) Sequencing with the T7 and T3 primers confirms the insert contains the following sequence:

(SEQ ID NO:10)

5′:CTCGAGGGGACTTTCCCGGGGACTTTCCGGGGACTTTCCGGGACTTT
CCATCTGCCATCTCAATTAGTCAGCAACCATAGTCCCGCCCCTAACTCCG
CCCATCCCGCCCCTAACTCCGCCCAGTTCCGCCCATTCTCCGCCCCATGG
CTGACTAATTTTTTTTATTTATGCAGAGGCCGAGGCCGCCTCGGCCTCTG
AGCTATTCCAGAAGTAGTGAGGAGGCTTTTTTGGAGGCCTAGGCTTTTGC
AAAAAGCTT:3′

[0564] Next, replace the SV40 minimal promoter element present in the pSEAP2-promoter plasmid (CLONTECH™) with this NF-κB/SV40 fragment using XhoI and HindIII. However, this vector does not contain a neomycin resistance gene, and therefore, is not preferred for mammalian expression systems.

[0565] In order to generate stable mammalian cell lines, the NF-κB/SV40/SEAP cassette is removed from the above NF-κB/SEAP vector using restriction enzymes SalI and NotI, and inserted into a vector containing neomycin resistance. Particularly, the NF-κB/SV40/SEAP cassette was inserted into pGFP-1 (CLONTECH™), replacing the GFP gene, after restricting pGFP-1 with SalI and NotI.

[0566] Once NF-κB/SV40/SEAP/Neo vector is created, stable Jurkat T-cells are created and maintained according to the protocol described in Example 13. Similarly, the method for assaying supernatants with these stable Jurkat T-cells is also described in Example 13. As a positive control, exogenous TNF alpha (0.1, 1, 10 ng) is added to wells H9, H10, and H11, with a 5-10 fold activation typically observed.

### Example 17

### Assay for SEAP Activity

[0567] As a reporter molecule for the assays described in Examples 13-16, SEAP activity is assayed using the Tropix Phospho-light Kit (Cat. BP-400) according to the following general procedure. The Tropix Phospho-light Kit supplies the Dilution, Assay, and Reaction Buffers used below.

[0568] Prime a dispenser with the 2.5× Dilution Buffer and dispense 15 μl of 2.5× dilution buffer into Optiplates containing 35 μl of a supernatant. Seal the plates with a plastic sealer and incubate at 65° C. for 30 min. Separate the Optiplates to avoid uneven heating.

[0569] Cool the samples to room temperature for 15 minutes. Empty the dispenser and prime with the Assay Buffer. Add 50 μl Assay Buffer and incubate at room temperature 5 min. Empty the dispenser and prime with the Reaction Buffer (see the table below). Add 50 μl Reaction Buffer and incubate at room temperature for 20 minutes. Since the intensity of the chemiluminescent signal is time dependent, and it takes about 10 minutes to read 5 plates on luminometer, one should treat 5 plates at each time and start the second set 10 minutes later.

[0570] Read the relative light unit in the luminometer. Set H12 as blank, and print the results. An increase in chemiluminescence indicates reporter activity.

Reaction Buffer Formulation:

| # of plates | Rxn buffer diluent (ml) | CSPD (ml) |
|---|---|---|
| 10 | 60 | 3 |
| 11 | 65 | 3.25 |
| 12 | 70 | 3.5 |
| 13 | 75 | 3.75 |
| 14 | 80 | 4 |
| 15 | 85 | 4.25 |
| 16 | 90 | 4.5 |
| 17 | 95 | 4.75 |
| 18 | 100 | 5 |
| 19 | 105 | 5.25 |
| 20 | 110 | 5.5 |
| 21 | 115 | 5.75 |
| 22 | 120 | 6 |
| 23 | 125 | 6.25 |
| 24 | 130 | 6.5 |
| 25 | 135 | 6.75 |
| 26 | 140 | 7 |
| 27 | 145 | 7.25 |
| 28 | 150 | 7.5 |
| 29 | 155 | 7.75 |
| 30 | 160 | 8 |
| 31 | 165 | 8.25 |
| 32 | 170 | 8.5 |
| 33 | 175 | 8.75 |
| 34 | 180 | 9 |
| 35 | 185 | 9.25 |
| 36 | 190 | 9.5 |
| 37 | 195 | 9.75 |
| 38 | 200 | 10 |
| 39 | 205 | 10.25 |
| 40 | 210 | 10.5 |
| 41 | 215 | 10.75 |
| 42 | 220 | 11 |
| 43 | 225 | 11.25 |
| 44 | 230 | 11.5 |
| 45 | 235 | 11.75 |
| 46 | 240 | 12 |
| 47 | 245 | 12.25 |
| 48 | 250 | 12.5 |
| 49 | 255 | 12.75 |
| 50 | 260 | 13 |

### Example 18

### High-Throughput Screening Assay Identify the Changes in Small Molecule Concentration and Membrane Permeability

[0571] Binding of a ligand to a receptor is known to alter intracellular levels of small molecules, such as calcium, potassium, sodium, and pH, as well as alter membrane potential. These alterations can be measured in an assay to identify supernatants which bind to receptors of a particular cell. Although the following protocol describes an assay for calcium, this protocol can easily be modified to detect changes in potassium, sodium, pH, membrane potential, or any other small molecule which is detectable by a fluorescent probe.

[0572] The following assay uses Fluorometric Imaging Plate Reader (“FLIPR”) to measure changes in fluorescent molecules (Molecular Probes) that bind small molecules. Clearly, any fluorescent molecule detecting a small molecule can be used instead of the calcium fluorescent molecule, fluo-3, used here.

[0573] For adherent cells, seed the cells at 10,000-20,000 cells/well in a Co-star black 96-well plate with clear bottom. The plate is incubated in a CO₂ incubator for 20 hours. The adherent cells are washed two times in Biotek washer with 200 μl of HBSS (Hank's Balanced Salt Solution) leaving 100 μl of buffer after the final wash.

[0574] A stock solution of 1 mg/ml fluo-3 is made in 10% pluronic acid DMSO. To load the cells with fluo-3, 50 μl of 12 ug/ml fluo-3 is added to each well. The plate is incubated at 37° C. in a CO₂ incubator for 60 min. The plate is washed four times in the Biotek washer with HBSS leaving 100 μl of buffer.

[0575] For non-adherent cells, the cells are spun down from culture media. Cells are re-suspended to 2-5×10⁶ cells/ml with HBSS in a 50-ml conical tube. 4 μl of 1 mg/ml fluo-3 solution in 10% pluronic acid DMSO is added to each ml of cell suspension. The tube is then placed in a 37° C. water bath for 30-60 min. The cells are washed twice with HBSS, resuspended to 1×10⁶ cells/ml, and dispensed into a microplate, 100 μl/well. The plate is centrifuged at 1000 rpm for 5 min. The plate is then washed once in Denley CellWash with 200 μl, followed by an aspiration step to 100 μl final volume.

[0576] For a non-cell based assay, each well contains a fluorescent molecule, such as fluo-3. The supernatant is added to the well, and a change in fluorescence is detected.

[0577] To measure the fluorescence of intracellular calcium, the FLIPR is set for the following parameters: (1) System gain is 300-800 mW; (2) Exposure time is 0.4 second; (3) Camera F/stop is F/2; (4) Excitation is 488 nm; (5) Emission is 530 nm; and (6) Sample addition is 50 μl. Increased emission at 530 nm indicates an extracellular signaling event which has resulted in an increase in the intracellular Ca⁺⁺ concentration.

### Example 19

### High-Throughput Screening Assay Identifying Tyrosine Kinase Activity

[0578] The Protein Tyrosine Kinases (PTK) represent a diverse group of transmembrane and cytoplasmic kinases. Within the Receptor Protein Tyrosine Kinase RPTK) group are receptors for a range of mitogenic and metabolic growth factors including the PDGF, FGF, EGF, NGF, HGF and Insulin receptor subfamilies. In addition there are a large family of RPTKs for which the corresponding ligand is unknown. Ligands for RPTKs include mainly secreted small proteins, but also membrane-bound and extracellular matrix proteins.

[0579] Activation of RPTK by ligands involves ligand-mediated receptor dimerization, resulting in transphosphorylation of the receptor subunits and activation of the cytoplasmic tyrosine kinases. The cytoplasmic tyrosine kinases include receptor associated tyrosine kinases of the src-family (e.g., src, yes, Ick, lyn, fyn) and non-receptor linked and cytosolic protein tyrosine kinases, such as the Jak family, members of which mediate signal transduction triggered by the cytokine superfamily of receptors (e.g., the Interleukins, Interferons, GM-CSF, and Leptin).

[0580] Because of the wide range of known factors capable of stimulating tyrosine kinase activity, the identification of novel human secreted proteins capable of activating tyrosine kinase signal transduction pathways are of interest. Therefore, the following protocol is designed to identify those novel human secreted proteins capable of activating the tyrosine kinase signal transduction pathways.

[0581] Seed target cells (e.g., primary keratinocytes) at a density of approximately 25,000 cells per well in a 96 well LOPRODYNE™ Silent Screen Plates purchased from Nalge Nunc (Naperville, Ill.). The plates are sterilized with two 30 minute rinses with 100% ethanol, rinsed with water and dried overnight. Some plates are coated for 2 hr with 100 ml of cell culture grade type I collagen (50 mg/mil), gelatin (2%) or polylysine (50 mg/ml), all of which can be purchased from Sigma Chemicals (St. Louis, Mo.) or 10% MATRIGEL™ purchased from Becton Dickinson (Bedford, Mass.), or calf serum, rinsed with PBS and stored at 4° C. Cell growth on these plates is assayed by seeding 5,000 cells/well in growth medium and indirect quantitation of cell number through use of ALAMARBLUE™ as described by the manufacturer Alamar Biosciences, Inc. (Sacramento, Calif.) after 48 hr. Falcon plate covers #3071 from Becton Dickinson (Bedford, Mass.) are used to cover the LOPRODYNE™ Silent Screen Plates. Falcon Microtest III cell culture plates can also be used in some proliferation experiments.

[0582] To prepare extracts, A431 cells are seeded onto the nylon membranes of LOPRODYNE™ plates (20,000/200 ml/well) and cultured overnight in complete medium. Cells are quiesced by incubation in serum-free basal medium for 24 hr. After 5-20 minutes treatment with EGF (60 ng/ml) or 50 μl of the supernatant produced in Example 11, the medium was removed and 100 ml of extraction buffer ((20 mM HEPES pH 7.5, 0.15 M NaCl, 1% Triton X-100, 0.1% SDS, 2 mM Na3VO4, 2 mM Na4P207 and a cocktail of protease inhibitors (# 1836170) obtained from Boeheringer Mannheim (Indianapolis, Ind.) is added to each well and the plate is shaken on a rotating shaker for 5 minutes at 4° C. The plate is then placed in a vacuum transfer manifold and the extract filtered through the 0.45 mm membrane bottoms of each well using house vacuum. Extracts are collected in a 96-well catch/assay plate in the bottom of the vacuum manifold and immediately placed on ice. To obtain extracts clarified by centrifugation, the content of each well, after detergent solubilization for 5 minutes, is removed and centrifuged for 15 minutes at 4° C. at 16,000×g.

[0583] Test the filtered extracts for levels of tyrosine kinase activity. Although many methods of detecting tyrosine kinase activity are known, one method is described here.

[0584] Generally, the tyrosine kinase activity of a supernatant is evaluated by determining its ability to phosphorylate a tyrosine residue on a specific substrate (a biotinylated peptide). Biotinylated peptides that can be used for this purpose include PSK1 (corresponding to amino acids 6-20 of the cell division kinase cdc2-p34) and PSK2 (corresponding to amino acids 1-17 of gastrin). Both peptides are substrates for a range of tyrosine kinases and are available from Boehringer Mannheim.

[0585] The tyrosine kinase reaction is set up by adding the following components in order. First, add 10 μl of 5 μM Biotinylated Peptide, then 10 μl ATP/Mg₂₊ (5 mM ATP/50 mM MgCl₂), then 10 μl of 5× Assay Buffer (40 mM imidazole hydrochloride, pH7.3, 40 mM beta-glycerophosphate, 1 mM EGTA, 100 mM MgCl₂, 5 mM MnCl₂, 0.5 mg/ml BSA), then 5 μl of Sodium Vanadate (1 mM), and then 5 μl of water. Mix the components gently and preincubate the reaction mix at 30° C. for 2 min. Initial the reaction by adding 10 μl of the control enzyme or the filtered supernatant.

[0586] The tyrosine kinase assay reaction is then terminated by adding 10 μl of 120 mm EDTA and place the reactions on ice.

[0587] Tyrosine kinase activity is determined by transferring 50 μl aliquot of reaction mixture to a microtiter plate (MTP) module and incubating at 37° C. for 20 min. This allows the streptavadin coated 96 well plate to associate with the biotinylated peptide. Wash the MTP module with 300 ul/well of PBS four times. Next add 75 μl of anti-phospotyrosine antibody conjugated to horse radish peroxidase (anti-P-Tyr-POD(0.5 u/ml)) to each well and incubate at 37° C. for one hour. Wash the well as above.

[0588] Next add 100 μl of peroxidase substrate solution (Boehringer Mannheim) and incubate at room temperature for at least 5 mins (up to 30 min). Measure the absorbance of the sample at 405 nm by using ELISA reader. The level of bound peroxidase activity is quantitated using an ELISA reader and reflects the level of tyrosine kinase activity.

### Example 20

### High-Throughput Screening Assay Identifying Phosphorylation Activity

[0589] As a potential alternative and/or compliment to the assay of protein tyrosine kinase activity described in Example 19, an assay which detects activation (phosphorylation) of major intracellular signal transduction intermediates can also be used. For example, as described below one particular assay can detect tyrosine phosphorylation of the Erk-1 and Erk-2 kinases. However, phosphorylation of other molecules, such as Raf, JNK, p38 MAP, Map kinase kinase (MEK), MEK kinase, Src, Muscle specific kinase (MuSK), IRAK, Tec, and Janus, as well as any other phosphoserine, phosphotyrosine, or phosphothreonine molecule, can be detected by substituting these molecules for Erk-1 or Erk-2 in the following assay.

[0590] Specifically, assay plates are made by coating the wells of a 96-well ELISA plate with 0.1 ml of protein G (1 ug/ml) for 2 hr at room temp, (RT). The plates are then rinsed with PBS and blocked with 3% BSA/PBS for 1 hr at RT. The protein G plates are then treated with 2 commercial monoclonal antibodies (10 ng/well) against Erk-1 and Erk-2 (1 hr at RT) (Santa Cruz Biotechnology). (To detect other molecules, this step can easily be modified by substituting a monoclonal antibody detecting any of the above described molecules.) After 3-5 rinses with PBS, the plates are stored at 4° C. until use.

[0591] A431 cells are seeded at 20,000/well in a 96-well LOPRODYNE™ filterplate and cultured overnight in growth medium. The cells are then starved for 48 hr in basal medium (DMEM) and then treated with EGF (6 ng/well) or 50 μl of the supernatants obtained in Example 11 for 5-20 minutes. The cells are then solubilized and extracts filtered directly into the assay plate.

[0592] After incubation with the extract for 1 hr at RT, the wells are again rinsed. As a positive control, a commercial preparation of MAP kinase (10 ng/well) is used in place of A431 extract. Plates are then treated with a commercial polyclonal (rabbit) antibody (1 ug/ml) which specifically recognizes the phosphorylated epitope of the Erk-1 and Erk-2 kinases (1 hr at RT). This antibody is biotinylated by standard procedures. The bound polyclonal antibody is then quantitated by successive incubations with Europium-streptavidin and Europium fluorescence enhancing reagent in the Wallac DELFIA instrument (time-resolved fluorescence). An increased fluorescent signal over background indicates a phosphorylation.

### Example 21

### Method of Determining Alterations in a Gene Corresponding to a Polynucleotide

[0593] RNA isolated from entire families or individual patients presenting with a phenotype of interest (such as a disease) is be isolated. cDNA is then generated from these RNA samples using protocols known in the art. (See, Sambrook.) The cDNA is then used as a template for PCR, employing primers surrounding regions of interest in SEQ ID NO:X. Suggested PCR conditions consist of 35 cycles at 95° C. for 30 seconds; 60-120 seconds at 52-58° C.; and 60-120 seconds at 70° C., using buffer solutions described in Sidransky, D., et al., Science 252: 706 (1991).

[0594] PCR products are then sequenced using primers labeled at their 5′ end with T4 polynucleotide kinase, employing SequiTherm Polymerase. (Epicentre Technologies). The intron-exon borders of selected exons is also determined and genomic PCR products analyzed to confirm the results. PCR products harboring suspected mutations is then cloned and sequenced to validate the results of the direct sequencing.

[0595] PCR products is cloned into T-tailed vectors as described in Holton, T. A. and Graham, M. W., Nucleic Acids Research, 19: 1156 (1991) and sequenced with 17 polymerase (United States Biochemical). Affected individuals are identified by mutations not present in unaffected individuals.

[0596] Genomic rearrangements are also observed as a method of determining alterations in a gene corresponding to a polynucleotide. Genomic clones isolated according to Example 2 are nick-translated with digoxigenindeoxy-uridine 5′-triphosphate (Boehringer Manheim), and FISH performed as described in Johnson, Cg. et al., Methods Cell Biol. 35: 73-99 (1991). Hybridization with the labeled probe is carried out using a vast excess of human cot-1 DNA for specific hybridization to the corresponding genomic locus.

[0597] Chromosomes are counterstained with 4,6-diamino-2-phenylidole and propidium iodide, producing a combination of C- and R-bands. Aligned images for precise mapping are obtained using a triple-band filter set (Chroma Technology, Brattleboro, Vt.) in combination with a cooled charge-coupled device camera (Photometrics, Tucson, Ariz.) and variable excitation wavelength filters. (Johnson, Cv. et al., Genet. Anal. Tech. Appl., 8: 75 (1991).) Image collection, analysis and chromosomal fractional length measurements are performed using the ISee Graphical Program System. (Inovision Corporation, Durham, N.C.) Chromosome alterations of the genomic region hybridized by the probe are identified as insertions, deletions, and translocations. These alterations are used as a diagnostic marker for an associated disease.

### Example 22

### Method of Detecting Abnormal Levels of a Polypeptide in a Biological Sample

[0598] A polypeptide of the present invention can be detected in a biological sample, and if an increased or decreased level of the polypeptide is detected, this polypeptide is a marker for a particular phenotype. Methods of detection are numerous, and thus, it is understood that one skilled in the art can modify the following assay to fit their particular needs.

[0599] For example, antibody-sandwich ELISAs are used to detect polypeptides in a sample, preferably a biological sample. Wells of a microtiter plate are coated with specific antibodies, at a final concentration of 0.2 to 10 μg/ml. The antibodies are either monoclonal or polyclonal and are produced by the method described in Example 10. The wells are blocked so that non-specific binding of the polypeptide to the well is reduced.

[0600] The coated wells are then incubated for >2 hours at RT with a sample containing the polypeptide. Preferably, serial dilutions of the sample should be used to validate results. The plates are then washed three times with deionized or distilled water to remove unbounded polypeptide.

[0601] Next, 50 μl of specific antibody-alkaline phosphatase conjugate, at a concentration of 25-400 ng, is added and incubated for 2 hours at room temperature. The plates are again washed three times with deionized or distilled water to remove unbounded conjugate.

[0602] Add 75 μl of 4-methylumbelliferyl phosphate (MUP) or p-nitrophenyl phosphate (NPP) substrate solution to each well and incubate 1 hour at room temperature. Measure the reaction by a microtiter plate reader. Prepare a standard curve, using serial dilutions of a control sample, and plot polypeptide concentration on the X-axis (log scale) and fluorescence or absorbance of the Y-axis (linear scale). Interpolate the concentration of the polypeptide in the sample using the standard curve.

### Example 23

### Formulating a Polypeptide

[0603] The secreted polypeptide composition will be formulated and dosed in a fashion consistent with good medical practice, taking into account the clinical condition of the individual patient (especially the side effects of treatment with the secreted polypeptide alone), the site of delivery, the method of administration, the scheduling of administration, and other factors known to practitioners. The “effective amount” for purposes herein is thus determined by such considerations.

[0604] As a general proposition, the total pharmaceutically effective amount of secreted polypeptide administered parenterally per dose will be in the range of about 1 μg/kg/day to 10 mg/kg/day of patient body weight, although, as noted above, this will be subject to therapeutic discretion. More preferably, this dose is at least 0.01 mg/kg/day, and most preferably for humans between about 0.01 and 1 mg/kg/day for the hormone. If given continuously, the secreted polypeptide is typically administered at a dose rate of about 1 μg/kg/hour to about 50 μg/kg/hour, either by 1-4 injections per day or by continuous subcutaneous infusions, for example, using a mini-pump. An intravenous bag solution may also be employed. The length of treatment needed to observe changes and the interval following treatment for responses to occur appears to vary depending on the desired effect.

[0605] Pharmaceutical compositions containing the secreted protein of the invention are administered orally, rectally, parenterally, intracistemally, intravaginally, intraperitoneally, topically (as by powders, ointments, gels, drops or transdermal patch), bucally, or as an oral or nasal spray. “Pharmaceutically acceptable carrier” refers to a non-toxic solid, semisolid or liquid filler, diluent, encapsulating material or formulation auxiliary of any type. The term “parenteral” as used herein refers to modes of administration which include intravenous, intramuscular, intraperitoneal, intrasternal, subcutaneous and intraarticular injection and infusion.

[0606] The secreted polypeptide is also suitably administered by sustained-release systems. Suitable examples of sustained-release compositions include semi-permeable polymer matrices in the form of shaped articles, e.g., films, or mirocapsules. Sustained-release matrices include polylactides (U.S. Pat. No. 3,773,919, EP 58,481), copolymers of L-glutamic acid and gamma-ethyl-L-glutamate (Sidman, U. et al., Biopolymers 22: 547-556 (1983)), poly(2-hydroxyethyl methacrylate) (R. Langer et al., J. Biomed. Mater. Res. 15: 167-277 (1981), and R. Langer, Chem. Tech. 12: 98-105 (1982)), ethylene vinyl acetate (R. Langer et al.) or poly-D-(-)-3-hydroxybutyric acid (EP 133,988). Sustained-release compositions also include liposomally entrapped polypeptides. Liposomes containing the secreted polypeptide are prepared by methods known per se: DE 3,218,121; Epstein et al., Proc. Natl. Acad. Sci. USA 82: 3688-3692 (1985); Hwang et al., Proc. Natl. Acad. Sci. USA 77: 4030-4034 (1980); EP 52,322; EP 36,676; EP 88,046; EP 143,949; EP 142,641; Japanese Pat. Appl. 83-118008; U.S. Pat. Nos. 4,485,045 and 4,544,545; and EP 102,324. Ordinarily, the liposomes are of the small (about 200-800 Angstroms) unilamellar type in which the lipid content is greater than about 30 mol. percent cholesterol, the selected proportion being adjusted for the optimal secreted polypeptide therapy.

[0607] For parenteral administration, in one embodiment, the secreted polypeptide is formulated generally by mixing it at the desired degree of purity, in a unit dosage injectable form (solution, suspension, or emulsion), with a pharmaceutically acceptable carrier, i.e., one that is non-toxic to recipients at the dosages and concentrations employed and is compatible with other ingredients of the formulation. For example, the formulation preferably does not include oxidizing agents and other compounds that are known to be deleterious to polypeptides.

[0608] Generally, the formulations are prepared by contacting the polypeptide uniformly and intimately with liquid carriers or finely divided solid carriers or both. Then, if necessary, the product is shaped into the desired formulation. Preferably the carrier is a parenteral carrier, more preferably a solution that is isotonic with the blood of the recipient. Examples of such carrier vehicles include water, saline, Ringer's solution, and dextrose solution. Non-aqueous vehicles such as fixed oils and ethyl oleate are also useful herein, as well as liposomes.

[0609] The carrier suitably contains minor amounts of additives such as substances that enhance isotonicity and chemical stability. Such materials are non-toxic to recipients at the dosages and concentrations employed, and include buffers such as phosphate, citrate, succinate, acetic acid, and other organic acids or their salts; antioxidants such as ascorbic acid; low molecular weight (less than about ten residues) polypeptides, e.g., polyarginine or tripeptides; proteins, such as serum albumin, gelatin, or immunoglobulins; hydrophilic polymers such as polyvinylpyrrolidone; amino acids, such as glycine, glutamic acid, aspartic acid, or arginine; monosaccharides, disaccharides, and other carbohydrates including cellulose or its derivatives, glucose, manose, or dextrins; chelating agents such as EDTA; sugar alcohols such as mannitol or sorbitol; counterions such as sodium; and/or nonionic surfactants such as polysorbates, poloxamers, or PEG.

[0610] The secreted polypeptide is typically formulated in such vehicles at a concentration of about 0.1 mg/ml to 100 mg/ml, preferably 1-10 mg/ml, at a pH of about 3 to 8. It will be understood that the use of certain of the foregoing excipients, carriers, or stabilizers will result in the formation of polypeptide salts.

[0611] Any polypeptide to be used for therapeutic administration can be sterile. Sterility is readily accomplished by filtration through sterile filtration membranes (e.g., 0.2 micron membranes). Therapeutic polypeptide compositions generally are placed into a container having a sterile access port, for example, an intravenous solution bag or vial having a stopper pierceable by a hypodermic injection needle.

[0612] Polypeptides ordinarily will be stored in unit or multi-dose containers, for example, sealed ampoules or vials, as an aqueous solution or as a lyophilized formulation for reconstitution. As an example of a lyophilized formulation, 10-ml vials are filled with 5 ml of sterile-filtered 1% (w/v) aqueous polypeptide solution, and the resulting mixture is lyophilized. The infusion solution is prepared by reconstituting the lyophilized polypeptide using bacteriostatic Water-for-Injection.

[0613] The invention also provides a pharmaceutical pack or kit comprising one or more containers filled with one or more of the ingredients of the pharmaceutical compositions of the invention. Associated with such container(s) can be a notice in the form prescribed by a governmental agency regulating the manufacture, use or sale of pharmaceuticals or biological products, which notice reflects approval by the agency of manufacture, use or sale for human administration. In addition, the polypeptides of the present invention may be employed in conjunction with other therapeutic compounds.

### Example 24

### Method of Treating Decreased Levels of the Polypeptide

[0614] It will be appreciated that conditions caused by a decrease in the standard or normal expression level of a secreted protein in an individual can be treated by administering the polypeptide of the present invention, preferably in the secreted form. Thus, the invention also provides a method of treatment of an individual in need of an increased level of the polypeptide comprising administering to such an individual a pharmaceutical composition comprising an amount of the polypeptide to increase the activity level of the polypeptide in such an individual.

[0615] For example, a patient with decreased levels of a polypeptide receives a daily dose 0.1-100 μg/kg of the polypeptide for six consecutive days. Preferably, the polypeptide is in the secreted form. The exact details of the dosing scheme, based on administration and formulation, are provided in Example 23.

### Example 25

### Method of Treating Increased Levels of the Polypeptide

[0616] Antisense technology is used to inhibit production of a polypeptide of the present invention. This technology is one example of a method of decreasing levels of a polypeptide, preferably a secreted form, due to a variety of etiologies, such as cancer.

[0617] For example, a patient diagnosed with abnormally increased levels of a polypeptide is administered intravenously antisense polynucleotides at 0.5, 1.0, 1.5, 2.0 and 3.0 mg/kg day for 21 days. This treatment is repeated after a 7-day rest period if the treatment was well tolerated. The formulation of the antisense polynucleotide is provided in Example 23.

### Example 26

### Method of Treatment Using Gene Therapy

[0618] One method of gene therapy transplants fibroblasts, which are capable of expressing a polypeptide, onto a patient. Generally, fibroblasts are obtained from a subject by skin biopsy. The resulting tissue is placed in tissue-culture medium and separated into small pieces. Small chunks of the tissue are placed on a wet surface of a tissue culture flask, approximately ten pieces are placed in each flask. The flask is turned upside down, closed tight and left at room temperature over night. After 24 hours at room temperature, the flask is inverted and the chunks of tissue remain fixed to the bottom of the flask and fresh media (e.g., Ham's F12 media, with 10% FBS, penicillin and streptomycin) is added. The flasks are then incubated at 37° C. for approximately one week.

[0619] At this time, fresh media is added and subsequently changed every several days. After an additional two weeks in culture, a monolayer of fibroblasts emerge. The monolayer is trypsinized and scaled into larger flasks.

[0620] pMV-7 (Kirschmeier, P. T. et al., DNA, 7: 219-25 (1988)), flanked by the long terminal repeats of the Moloney murine sarcoma virus, is digested with EcoRI and HindIII and subsequently treated with calf intestinal phosphatase. The linear vector is fractionated on agarose gel and purified, using glass beads.

[0621] The cDNA encoding a polypeptide of the present invention can be amplified using PCR primers which correspond to the 5′ and 3′ end sequences respectively as set forth in Example 1. Preferably, the 5′ primer contains an EcoRI site and the 3′ primer includes a HindIII site. Equal quantities of the Moloney murine sarcoma virus linear backbone and the amplified EcoRI and HindIII fragment are added together, in the presence of T4 DNA ligase. The resulting mixture is maintained under conditions appropriate for ligation of the two fragments. The ligation mixture is then used to transform bacteria HB101, which are then plated onto agar containing kanamycin for the purpose of confirming that the vector has the gene of interest properly inserted.

[0622] The amphotropic pA317 or GP+am12 packaging cells are grown in tissue culture to confluent density in Dulbecco's Modified Eagles Medium (DMEM) with 10% calf serum (CS), penicillin and streptomycin. The MSV vector containing the gene is then added to the media and the packaging cells transduced with the vector. The packaging cells now produce infectious viral particles containing the gene (the packaging cells are now referred to as producer cells).

[0623] Fresh media is added to the transduced producer cells, and subsequently, the media is harvested from a 10 cm plate of confluent producer cells. The spent media, containing the infectious viral particles, is filtered through a millipore filter to remove detached producer cells and this media is then used to infect fibroblast cells. Media is removed from a sub-confluent plate of fibroblasts and quickly replaced with the media from the producer cells. This media is removed and replaced with fresh media. If the titer of virus is high, then virtually all fibroblasts will be infected and no selection is required. If the titer is very low, then it is necessary to use a retroviral vector that has a selectable marker, such as neo or his. Once the fibroblasts have been efficiently infected, the fibroblasts are analyzed to determine whether protein is produced.

[0624] The engineered fibroblasts are then transplanted onto the host, either alone or after having been grown to confluence on cytodex 3 microcarrier beads.

[0625] It will be clear that the invention may be practiced otherwise than as particularly described in the foregoing description and examples. Numerous modifications and variations of the present invention are possible in light of the above teachings and, therefore, are within the scope of the appended claims.

[0626] The entire disclosure of each document cited (including patents, patent applications, journal articles, abstracts, laboratory manuals, books, or other disclosures) in the Background of the Invention, Detailed Description, and Examples is hereby incorporated herein by reference. Further, the hard copy of the sequence listing submitted herewith and the corresponding computer readable form are both incorporated herein by reference in their entireties.

The application's sequence listing, which the Patent Office published only in electronic form, follows.

SEQUENCE LISTING (737 sequences)

SEQ ID NO: 1 - DNA, 733 bp, Homo sapiens
gggatccggagcccaaatcttctgacaaaactcacacatgcccaccgtgcccagcacctgaattcgagggtgcaccgtcagtcttcctcttccccccaaaacccaaggacaccctcatgatctcccggactcctgaggtcacatgcgtggtggtggacgtaagccacgaagaccctgaggtcaagttcaactggtacgtggacggcgtggaggtgcataatgccaagacaaagccgcgggaggagcagtacaacagcacgtaccgtgtggtcagcgtcctcaccgtcctgcaccaggactggctgaatggcaaggagtacaagtgcaaggtctccaacaaagccctcccaacccccatcgagaaaaccatctccaaagccaaagggcagccccgagaaccacaggtgtacaccctgcccccatcccgggatgagctgaccaagaaccaggtcagcctgacctgcctggtcaaaggcttctatccaagcgacatcgccgtggagtgggagagcaatgggcagccggagaacaactacaagaccacgcctcccgtgctggactccgacggctccttcttcctctacagcaagctcaccgtggacaagagcaggtggcagcaggggaacgtcttctcatgctccgtgatgcatgaggctctgcacaaccactacacgcagaagagcctctccctgtctccgggtaaatgagtgcgacggccgcgactctagaggat

SEQ ID NO: 2 - protein, 5 aa, Homo sapiens
  Site (3): Xaa equals any of the twenty naturally ocurring L-amino acids
WSXWS

SEQ ID NO: 3 - DNA, 86 bp, Homo sapiens
gcgcctcgagatttccccgaaatctagatttccccgaaatgatttccccgaaatgatttccccgaaatatctgccatctcaattag

SEQ ID NO: 4 - DNA, 27 bp, Homo sapiens
gcggcaagctttttgcaaagcctaggc

SEQ ID NO: 5 - DNA, 271 bp, Homo sapiens
ctcgagatttccccgaaatctagatttccccgaaatgatttccccgaaatgatttccccgaaatatctgccatctcaattagtcagcaaccatagtcccgcccctaactccgcccatcccgcccctaactccgcccagttccgcccattctccgccccatggctgactaattttttttatttatgcagaggccgaggccgcctcggcctctgagctattccagaagtagtgaggaggcttttttggaggcctaggcttttgcaaaaagctt

SEQ ID NO: 6 - DNA, 32 bp, Homo sapiens
gcgctcgagggatgacagcgatagaaccccgg

SEQ ID NO: 7 - DNA, 31 bp, Homo sapiens
gcgaagcttcgcgactccccggatccgcctc

SEQ ID NO: 8 - DNA, 12 bp, Homo sapiens
ggggactttccc

SEQ ID NO: 9 - DNA, 73 bp, Homo sapiens
gcggcctcgaggggactttcccggggactttccggggactttccgggactttccatcctgccatctcaattag

SEQ ID NO: 10 - DNA, 256 bp, Homo sapiens
ctcgaggggactttcccggggactttccggggactttccgggactttccatctgccatctcaattagtcagcaaccatagtcccgcccctaactccgcccatcccgcccctaactccgcccagttccgcccattctccgccccatggctgactaattttttttatttatgcagaggccgaggccgcctcggcctctgagctattccagaagtagtgaggaggcttttttggaggcctaggcttttgcaaaaagctt

SEQ ID NO: 11 - DNA, 1387 bp, Homo sapiens
  SITE (34): n equals a,t,g, or c
tcccgctgcgccgcgcctgaagccgcgcagtagncctgctctcggagttttgacagtaccggagctgaaattgtcagcggcggcaagcgcaggaaagttgagaggagctcgtggccccagaacaaagcttgagaaaagtaaacaggcggctgctgccggcgagcctcccttcttccctctccccctcagcctccttcccgcccttgccctgctgtttccttccagcagctccgcgggggaggaggggaatgggcttgctctctctccggcgattactaacttttgcatcgcccctgttttgtctttctctccctgtccccttcccgccctctgcagaccatggtgaatccgggcagcagctcgcagccgcccccggtgacggccggctccctctcctggaagcggtgcgcaggctgcgggggcaagattgcggaccgctttctgctctatgccatggacagctattggcacagccggtgcctcaagtgctcctgctgccaggcgcagctgggcgacatcggcacgtcctgttacaccaaaagtggcatgatcctttgcagaaatgactacattaggttatttggaaatagcggtgcttgcagcgcttgcggacagtcgattcctgcgagtgaactcgtcatgagggcgcaaggcaatgtgtatcatcttaagtgttttacatgctctacctgccggaatcgcctggtcccgggagatcggtttcactacatcaatggcagtttattttgtgaacatgatagacctacagctctcatcaatggccatttgaattcacttcagagcaatccactactgccagaccagaaggtctgctaaaaggtcagagtaatgcagaatgcgtgccttcatctcagatttgttcatcacaggtggatcccatgtgtcttcagtagacaagtcacctttgtagctagcaccagtgccagctccatgccattgcaccttctttagtcttgattgcccttcccgcatttwttggtgtattaaaatgactratkaagctaattaaaagaagcattcaaatctgctttctaccctcattaacaattagcagggcactggccagagtttgtaccctgtgttttaccttaacaacattctatttgctctttgtatatttaagtgttgtaaggaaacgtgtttcaatcaaaactgaccatgagataaaggaaagagatgtggcttttgtgatattctatcacaaacacttattgtatctctgtaaaatacaatgtatgtatgcatgtaagtgtttttgtcctaatgttgctactcccatggcaaagaaaaaaaaaagaatgaaaaaaaraaaaaaaaaaaaaaaaaaaaaaaaaaactcgagggggggcccgtacccaatcgccct

SEQ ID NO: 12 - DNA, 1939 bp, Homo sapiens
gaacacaaacatgcagtctgtagcagatggtaataggctgayatattacacttgttgatgtaaatctgataggtttctttctctccaaggacagctttttaaatatttaacagtatcaataatttttcagtttctgtgagaattttataatttataatttgcagacttaatgtataatctattttgtcctaacaattacaaatatattttttatttcagattrtatatattcctaccagatggagataattacagctttaaaaatttttattttttcattttatttcacacattgacattaaatttttatggacacataataactgtacatatatatggggtagaatgtgatgttttaatacatgtactcaatgtgtaatgatcaaatcagggtaatttgcataatgatttttctgtagggagaaaattcaaaatctactcttctggctattttcaaatatataatatgttattgttaactatactcatcctactatgcaataggacaccagaacttattcctgggttctacatccgttaaggcaaccaaggattggaaatattggaaaaaaaaattgcgtctgtactgaacatgtacagacttttttcttgtccttattccttacacaatatagtacaataactatttgcatgacatttacatcggatattatgagtgatctagagttgatatgaagtatatgggaggatgtgcaaaggtgatgtgcaaatactatgtcattttatatcagggacttgagtatcctttgttaycctcaggagatcctgaaacyagtcccccatggatactgagggctgactgtatagtcctatcctcacggaactttcattctaatgrgggaagactgactataaacaaaatatatgtaataggtggtggtaagtaccgtggagaagtaacaaatggggcaaagtgagttatacagctccatycttagaaaccttggagtacttttcttagtttatactcgtggtggtttccttttgtctcctttattacatgggactctgacatgtgcccatagctagggtggcagtaggatctacccgaaaagcgtcctgctgatacaggaccaaagcatcctgttgttctcgagcctataaaaagagctaatggtcttgcttctcttaactgtggcctcctacactgtgttttggatgattggtgatgtcttggatattctgtttctttggaactttgaatatacaacactttactagggaattagcaatggaagcagagcaaagatgtacagaggaaacaatgcrtaactctgatggaattgaagtcatgaggcagcagagagcttaaattasagctttaaaaatttttattttttagagggaatttamttgggagtaacagcagtaatagttaacggagccagaatgcttgagtcatataattgcaaagcagagttgggagcaacagatgctaaagagtagttgctgtagttcctctttgggtcgtaggagcagttgtcatrttmctatayagctactgcatgaagaagagttcttagtgaggcctgggtgaacagctcttcttagtattctgtgtgaccccattygaccttttaacaaatccctaagtaaataaatagcccctmaggwaaactaagtttttctctgctgtttttttgcttgagagagctataactgtaatagacttatatttctgaacattttagtgcttgccaatatttggtaatatttatgtttcctatatttgtaatgaacattcttcttcmggtacatttyttgttaaattattgtttsatgsataaaagttcaccttttattgtataaaattgactcagattaatttatacacattgacaatgggtaaatagagtttttcagattattaaaagctgaaggatgcccatgtaagcaaaaaaaaaaaaaaaaaactcga

SEQ ID NO: 13 - DNA, 2602 bp, Homo sapiens
  SITE (126): n equals a,t,g, or c
  SITE (2540): n equals a,t,g, or c
  SITE (2564): n equals a,t,g, or c
gggttcttcgggcaactttcctttccgggtgttctgaagcggttttcctgtaatcctcagtgaggaaacccaccgtgaatcggattgccgttcagtcccacggaagcctggctcgttggccatgtnggggacgcatgttcattaagttcattaaaataatttcatttgtcttggtttgaagactgcttcattctgcctctagtaccagcggtttctctgttctgtgatcaatgtgattcacaggaactccttaagtaacaaacgaaatgagccaggggcgtggaaaatatgacttctatattggtctgggattggctatgagctccagcattttcattggaggaagtttcattttgaaaaaaaagggcctccttcgacttgccaggaaaggctctatgagagcaggtcaaggtggccatgcatatcttaaggaatggttgtggtgggctggactgctgtcaatgggagctggtgaggtggccaacttcgctgcgtatgcgtttgcaccagccactctagtgactccactaggagctctcagcgtgctagtaagtgccattctttcttcatactttctcaatgaaagacttaatcttcatgggaaaattgggtgtttgctaagtattctaggatctacagttatggtcattcatgctccaaaggaagaggagattgagactttaaatgaaatgtctcacaagctaggtgatccaggttttgtggtctttgcaacccttgtggtcattgtggccttgatattaatcttcgtggtgggtcctcgccatggacagacaaacattcttgtgtacataacaatctgctctgtaatcggcgcgttttcagtctcctgtgtgaagggcctgggcattgctatcaaggagctgtttgcagggaagcctgtgctgcggcatcccctggcttggattctgctgctgagcctcatcgtctgtgtgagcacacagattaattacctaaatagggccctggatatattcaacacttccattgtgactccaatatattatgtattctttacaacatcagttttaacttgttcagctattctttttaaggagtggcaagatatgcctgttgacgatgtcattggtactttgagtggcttctttacaatcattgtggggatattcttgttgcatgcctttaaagacgtcagctttagtctagcaagtctgcctgtgtcttttcgaaaagacgagaaagcaatgaatggcaatctctctaatatgtatgaagttcttaataataatgaagaaagcttaacctgtggaatcgaacaacacactggtgaaaatgtctcccgaagaaatggaaatctgacagctttttaagaaaggtgtaattaaaggttaatctgtgattgttatgaagtgaatttgaatatcatcagaatgtgtctgaaaaaacattgtcctcaaataatgttctttaaaggcaatctttttaaagatttcactaatttggaccaagaaattacttttcttgtatttaaacaaacaatggtagctcactaaaatgacctcagcacatgacgatttctattaacattttattgttgtagaagtattttacattttcatcccttctccaaaagccgaatgcactaatgacagttttaagtctatgaaaatgctttattttttcattggtgatgaaagtctgaaatgtgcatttgtcatccccactccatcaatccctgaccatgtaaggcttttttattttaaaaaaacagagttatcccaatacattatcctgtgatttaccttacctacaaaagtggctcctgtttgtttgatgatgattggttttatttttgaaatatttattaagggaaaactaagttactgaatgaaggaacctctttcttacaaaacaaaaaaaagggcagaaatcaccccaaggaacgatttctcaggttgagatgatcaccgtgaatccggcttcctctgagcattcgatggccttagcacctcatcaagccagcacatcctgcctgctgttgcagcctggctgggtttattcttcagttaccctaatcccatgatgcctggaaccttgattaccgttttacatcagctcttgtacttttcagtatattttcataatgagttatattgtcatttagactttgaacagctctgggaaatagaagactagggttgtttcttaaatttagctcatgttataataaaaagttgaaatgaagttcttattctaaaagtctgaatgcttagaacaaacttaacatgtttatagaatatggtctctttgtaccaagtactttgcttaagagctcctttgggccactacatattttggtttctagaaaatgtttgtttatgaagaagtcgatggaaaactgcaaacatatgcagaaaaggtagaataataaaaaaggtctaatgaactccattcagctttgaacctatccactcataaccattgactggccttttaaaaaaaagtattgggcagaattaaatttccacctaggtgatggggaaggaaagtgttcgcctgtnccagcctgtggttcctgcctgggnggtttacccagtggtggcgccaggccaaggtccattca

SEQ ID NO: 14 - DNA, 808 bp, Homo sapiens
  SITE (230): n equals a,t,g, or c
acccacgcgtccggttaaacaaagggaatgacgatatgggaaagaaaatacatttggatgttacagatatgtgtgttcctggagcccagggccaagccctccctgggggacttggattggtgatctctctccttggccccaacctgacatcttttcttgtccttttaggaatgtctgatggaaattcctcctaacctggggtcatactccatttcattctctgggctcantgagaaggaaaatttttttttaagtaatttactgaaaacccagatcacaccatcataaattcagataggtgcaattctgcccacaatgaaggcaaagtgttacactaatttgaaaacagtttagcctcttattcccccaaacttcattcttgaattttgtcattttttgtgggcaagctgtgggaaaggggcacaaaagtatcactgaagtattttttcaaaaaagaaaaaaggcagtcttcctctactaatgagaatgcaaaatgttgaacaactgtaaaatgttttcaccctgcttttagacataaagctttaaaaaactgtgaggtcttttatcacttccccattgtatatgtaatatggctccagataattactctgccacggggagaaaatcttccataactctcccctatatatatgtatactccaccaccttatcttgttatgtcatggtggtgggagtatttatmccacagaaacaggcaaatgatacaaacctgggcgacagagcaagactccacttcaaaaaaaaaaaaaaaaaaaaaaaaaaaaaaaaaaaaaaaaaaagggcggcc

SEQ ID NO: 15 - DNA, 2143 bp, Homo sapiens
  SITE (2136): n equals a,t,g, or c
tcagacaagcactggacgtggcggccattttkttttggacaccgagcaggagctggcggccgctgcagacgaaaggcaggaaagggcaggccgggtgagcagacggatcggccgactagacagccaaccagcaacaacgaactgagctcgcatactaccgcttacgcatctaaccaaccgcccatctagctaacccgagcccctccaccgtcaactcaggttcggccggtccccgcccgcctgccggagccgtggtggcagccccgggaggagcactggcgtctgtttccttcgattctcgggattcgaagatggctgcacagtcagcgccgaaagttgtgctaaaaagcaccaccaagatgtctctaaatgagcgctttactaatatgctgaagaacaaacagccgacgccagtgaatattcgggcttcgatgcagcaacaacagcagctagccagtgccagaaacagaagactggcccagcagatggagaatagaccctctgtccaggcagcattaaaacttaagcagaagagcttaaagcagcgcctgggtaagagtaacatccaggcacggttaggccgacccataggggccctggccaggggagcaatcggaggacgaggcctacccataatccagagaggcttgcccagaggaggactacgtgggggacgtgccaccagaaccctacttaggggcgggatgtcactccgaggtcaaaacctgctccgaggtggacgagccgtagctccccgaatgggcttaagaagaggtggtgttcgaggtcgtggaggtcctgggagagggggcctagggcgtggagctatgggtcgtggcggaatcggtggtagaggtcggggtatgataggtcggggaagagggggctttggaggccgaggccgaggccgtggacgagggagaggtgcccttgctcgccctgtattgaccaaggagcagctggacaaccaattggatgcatatatgtcgaaaacaaaaggacacctggatgctgagttggatgcctacatggcgcagacagatcccgaaaccaatgattgaagcctgcccatcctcccatgagagactcttgttagtcaacacatctgtaaataaccttgagataacagatgagaagaaatctgattgatgctggatggacctatcacaataggctgtggacttacttgccaccagcttgtgcatttagtgtgttccttttactttttgatactgtgttgtatgaaacccttttgtcctttgatttggttttttgkttttgtttttttaggggggagggggggtttcccctcctttgcccagacttctctttgarcacaaatgcattagccttgtggctagaacaccctcttcctacctctgtctcccctcacttgtcatatgctctgacatgctaacatttcttttgttcatccctgttgcccccacagaaacatcccagaaaaaccggtcagtgttccttcctccctgatccttaggtttctgaaatagggttctgttacatcctcttcgatagcctgtttaaaatgtttagaaggtctggagctcaaaaatgcgttcttccacattgataatttagtaaactgagaacattgacatcactacagggcagcataagaggttgcttacatgtggtagcagctctggtttgattcaagttgctaccatgtacattgacagcacatataccataaccagcgtgttgggttgaattgcactttctacctttgtatgagatttacagactttccttctgggtttgtatcatgaccagaggggtactatagggttggtttatactgcaatatagaggatcagaagccatttgatttggtaggtgtgtcagaagggagaatgatggcagacgaactgctggaagaggtcagaagatagccatgctaaaatgcaattatatcctcatgtttatcccaaactaatcttggacttttccactcattagctttgttttgcccttgtttcccttgaaggtttaagttcaaccatattctgtcaactgttcagtttcagtggaatcttgtatttctggttcattataacaaaytgttcgcttaaaaaaaaaaaaaaaaaaaagggcggccgctcyaraggatccaancttacgt

SEQ ID NO: 16 - DNA, 2361 bp, Homo sapiens
  SITE (1891): n equals a,t,g, or c
  SITE (2356): n equals a,t,g, or c
ggcacgagctcgagtttttttttttttttttttctatttttgccagactcttgatactcttaaaacttgtttgtggtcagcacaacaaggaacaaaacaaagctttgaaaaaactttaacatgaaaaaacgcactgacatttttttttatttaatatagcctggactttacctgcgtatgcacatgctcagaattgtctactaggctgactatgtatcacctcttcagcttggatccaattgtggatttatttacaaacatcaaatgccttcaagccaatcctttttgctgtatgttttgcagcctactgtagtagatacgcaacagatawtgtgggaaaaaaagagataagaggaggaagctaataagagactgtcaagattgtataccttcttggtttcttttaagaatttgttgcctttctactattacagcaaagcagcattttgttactgactgcctaaaatcacttaatctcaggtgaacgcatcacttgccaaactgttggaatgctatttgtgttttgttgcactgtttttttcgtttgtttgtttgtttatttggttggctttttggagagggaaatttggaaacgggacatacacaaaagttacacacccacattccctttttatcatgacatacaagaagaaactagcagagctaagaatggagtgaagaaaggcagtatggcaggcaccagcaaagagttgagggctgttgctcttaaaaattattttttttattattattttgaaagtatggaagttttccattcactggggaaaggagggaaaagtgcatttatttttatacagagttacttaattacctccaaaacacatatgttggaaatcgcttttgctggtgcaaagtatattaatgagcaggaatacatacattgaggttatgaatagagagctcaatttgtacctttgctgtcttgctcaagcttggtatggcatgaaaactcgactttattccaaaagtaacttcaaaatttaaaatactagaacgtttgctgcgataaatcttttggatttttgtgtttttctaatgagaatactgtttttcattacctaaagaacaatttgctaaacatgagaaatcactcactttgattatgtatagattacataggaagaacaatcacatcagtaagttatagtttatattaaaggtaattttctgttggctcataacaaatataccagcattcatgatagcatttcagcattttccaaggtaccaagtgtacttattttgttgttgttgttgttgttgtattttagaaggaattcagctctgatgtttttaaagaaaaccagcatctctgatgttgcaacatacgtgtaaaatgggtgttacatctatcctgccatttaaccccacagttaataaagtggctgaaaataatagtagctctggcttggtgcttgacctggttaaatactgtcttaaagctcatacaaaacaaataggcttttccataagtggcctttaagaaaacatggaagacaattcatgtttgacaaatgctgacagggtgaagaaagcccagtgtaaaaatgaatcgcgttttaagtgattcggttaaagagtttgggctcccgtagcaaactaatactagataataaggaaatgggggtgaaatatttttttattgttgaatcattttgtgaatgtccccctcaaaaaaagctaatggaatatttggcataaagggcatttggtggttttatttttgtttgagggggwttgtcagaaaatcccttttctctcttacgyctaactgactagggaacaattgttgatatgcatagcattgggaatacttgtcattatatactcttacaaataacacatgaagcaagaatgaccaatattctgnataattgggcactgggatcacaaaatgtgataaaactttaaatgtataaaactttatcaaataaagttttattttcccctttaaaatgtatttctttagaggcattacttttttaaaaatattggtcaattcctgacataagatgtgaggttcacagttgtattccagtattcaagatagattcctgatttttcaattaggaaaagtaaaatccaaaatgttagcaaaacaaagtgcaatattaaatgtttgctttatagattatattctatggctgtttgtaatttctctttttttccttttttatttggtgctgaatatgtccttgtaggctctgttttaagaaaacaatatgtgggaaatgatttaatttttcctattgctcttccttgtggaaaataaagtgttttgtttttttctgttttgtaaaaaaaaaaaaaaaaaaaaaaaaaaaaaaaaaagaangagaa

SEQ ID NO: 17 - DNA, 803 bp, Homo sapiens
  SITE (226): n equals a,t,g, or c
  SITE (695): n equals a,t,g, or c
cagctgcccacaaggtgggctcctgggggagggtcatccctctgagaagagggcggcaccaagacccacacacctgaaaaatgtggtacttcatgtcgctgatctcgatggtcttgctgctgtccccatcctgttctgatttattggtcattagtgtcttgaacctggagcaaaggagacaaagcaaggtgggttttgaaccttttacttcaccactgtgtggcgnatggcaccatctgtcacctgaccggctaccacaagacggaacattttaaaaattactgctgtgctcctaaaataattttcagcaagtgccattttacaccatcttaggaagacatctgagctgagcccaattctgtccccaccacccaccctacaagcgacctgacgcctgtggccagaatgctgactcttcattccaggatatttatgttttctaataataaaagcaataactaggccagaaagaacaccacctcagagcccccctttcctgctgccctgggtccaccccgtctcatcccgctgtggggcgagtggggctctgctgcaatgtgactgcagtctgaggggcagargctgcaggktacagccccagcgaktcactctctgtcacctggaatctgaaacaaggtgcttctgtgcccctgggctgggagtttgttatctgaggctgcctacctgttagaacntgtcaccagcaggactttatgtgcataaaacagctttccttccaccaaaaaaaaaaaaaaaaaactcgagggggggcccggtacccaattcgccctatagtgagcgat

SEQ ID NO: 18 - DNA, 1794 bp, Homo sapiens
  SITE (1788): n equals a,t,g, or c
ttcttttttgttcatgggacatggtacctaagcaaataggagttgggtttggtttttctcctaaaataatgctcaatacttacctaatcaaatggcatccatttgaataaaatgacaataactaaagctagttaatgtcagtgacattaaactaactccaggattcaggagttttaatgttagaatttagatttaacagatagagtgtggcttcatttgtccatggtagcccatctctcctaagaccttttctagtctgtcttcctgccttcgaacttgatgacagtaaaaccctgtttagtattctcttgtgcatttggtttgttggttagccgactgtcttgaaactattcattttgcttctagttttattttacagaggtagcattggtgggtttttttttttttttctgtctctgtgtttgaagtttcagtttctgttttctaggtaaggcttatttttgattagcagtcaatggcaaagaaaaagtaaatcaaagatgacttcttttcaaaatgtattgtttagcacttaactcagatgaatttataaattattaatcttgatactaaggatttgttacttttttgcatattaggttaatttttaccttacatgtgagagtcttaccactaagccattctgtctctgtactgttgggaagttttggaaacccctgccagtgatctggtgatgatctgatgatttatttaaagagccgttgatgcctccaggaaacttaagtattttattaatatatatataggaatttttttttattttgctttgtctttctctcccttcttttatcctcatgttcattcttcaaaccagtgttttggaagtatgcatgcaggcctataaatgaaaaacacaattctttatgtgtatagcatgtgtattaatgtctaactacatacgcaaaaacttcctttacagaggttcggactaacatttcacatgcacatttcaaaacaagatgtgtcatgaaaacagcccctttacctgccaagacaagcagggctatatttcagtgacagctgatatttgttttgaaagtgaatctcataatatatatatgtattacacattattatgactagaagtatgtaagaaatgatcagaacaaaagaaaatttctattttcatgcaaatatttttcatcagtcatcactctcaaatataaattaaaatataacactcctgaatgcctgaggcacgatctggattttaaatgtgtggtattcattgaaaagaagctctccacccacttggtatttcaagaaaatttaaaacgatcccaaggaaagatgatttgtatgttaaagtgactgcacaagtaaaagtccaatgttgtgtgcatgaaaaggattccttggttatgtgcagggaatcatctcacatgctgtttttcctatttggtttgagaaacaggctgacactattctctttgattagaaaataaactcataaaactcataatgttgatataatcaagatgtaaccactataaatatgtagaagaggaagttttaaaagaccttaagctggcattgtgaaggaacaccatggtagactctttttgtaaatgtattttgtatttaatgaaatgcagtataaaggttggtgaagtgtaatataattgtgtaaacaaatcctgttaatagagagatgtacagaatcgttttgtactgtatcttgaaacttgtgaaataaagattccacctctggttaaaaaaaaaaaaaaaaaaytcggggccagttcccccccggctattttaaaaggnaaaaag

SEQ ID NO: 19 - DNA, 1037 bp, Homo sapiens
tcgagttttttttttttttttgacagagtcttgctatgttgcccaggctggagtgcagtggcaatcttggctcaytgcaacctytgcytcctgggttcaagcaattytcctgcytcagcytccytagtagctgggactacaggcacctgccaccatgccaggttaactttttgtattttagtagagacagagtttcaccatgttgcccacgctggtgtcgaactcctgagctcaggcaatctgcccaccttggcctccgaaagtgctaggattacaggcttgagccactgcacccagccaagctgtacttttttttttttttttaaagcttcaaaccttcaatatttcattaagagttacagtttggtttcagtcattckgaggraaattaaggaaggggcttggcccawacctggtaaaagaatggaaggaaccaatttttaaccatttggaccagtgattytcaatgggagtgctttttgtcccccaggaaacatctrgaaaggtatawkgagatatttstggsttgtcacaatttgtgatgggggaaaaaagaactaccagtatcagggggatacaggcccggtatcaggtggatagaggcctggaatattgctaaacattctacagtgcaaagacascctttmacawacagaactatytggtccaaaatgtcaatagtgctgaggttgaagaactcaatattttatatgttttcagggaatttctatgtgggcttgggaaagtttgaagtcaattgtcatttgtatatttaaagggatatattttatcattagtctataaattccagttgcaaagtagaggccctgcacatttgtgcacatatacacacaccagaaataaaytmtctkgcaattatcttctctatcattgacagggcaatgacctatgaaaattatgttatgtctaatagtccctcattgttatgtgcaaaacacccagcaaagctcaagttaagrttgtggtcacaaagaaaagagctatcattgctttatgatgttgtctgaagttaatga

SEQ ID NO: 20 - DNA, 1273 bp, Homo sapiens
tggaagccctgactttaagaaatgccaaatgcaaggaccattaagaaaattctccccgaaatgaggctcctctaacaaatgatgattaaaacgctctctccttgagcagtcacattctagaaacaggacattccatgaggcaggaagagttcagttaatttgctcctgaaaaagtgtggttcagtgtttgtgtggcaatgtacgtgggcagaagaggccgctcaagctgtgtcccccctgagcaggattcaggaaagggaaaagaagttctcttcaactcagccaaggggccgtacgatggccgatgagattatgtatttaaaagttctttgtaaagtgtaaactaaaaaccttaaatgtaagatgctgttgttattattactgttgttgttgctgttatggacatgccaaaaggcccttgttagaagacagttttgccttttcaatctcatagcaaggaactcaagtctgatgcttcaaaaagatgagaagaagggcaagaagagggataactcccaagctcagaggaaaaaaaaaaggtgggggaaaagagccccagggtgaccttcaggaaaggccaggaccaggatgatctaacctttcccttcaccagaaacaaagctattgccagactgaaccctaaagtcaagcagtcacccactgcctttgctgggagcagaagcccatagcaacaagtgacctgcccctcagactcaagatcccagataccagagctggaggagtcatagggcattactggtaggcaggaaaactgagggtcgaacaaatggaagaatgcggtgatcatagaccaaagacacacagataattaaccccatgtgtccacccaggccaaagttcttcctgctaccccacagtggatgtccaggcagatggtccccacatgatggggaagcagagggcatagtgtggttttgtgggacttgttcatgttttgtagtgtgggctcaacagtgccaaaggaaacattagggaaaagttggtgaaacatgccagctagcaggaccagtaaaggcataatcaggcatttggcaaagcttgcttttctaattcaatgataggttctaataggaaatttttgaagattttttaaaacaatgttatagtggcacttccccagtatggaataaataacatgcattcttttttcaatatactgtcatattcagatgtcattaaaataaatggatgagtcacagaggagctatcagatgctctcatgactaccataactcaaaaaaaaaaaaaaaaa

SEQ ID NO: 21 - DNA, 1081 bp, Homo sapiens
  SITE (4): n equals a,t,g, or c
  SITE (7): n equals a,t,g, or c
  SITE (1033): n equals a,t,g, or c
  SITE (1080): n equals a,t,g, or c
acanatnttttacttaaattttattttatcttatttttaggtgcttttaatctcaaaattctgaaaagcgaatagcacgtgttttcagaaacaaatgtgaaagcagtcaaattaagtagatactatttagaaatgtaaaatactctccagatctaccattaatagaaaataaactaaaccttatattttatttttgccaaaatattttattataaaatatgaccaaaatatttaaaatgcacaatgcttttaacttaaatgtgctaaccctgtttctgtctgttttgtgctgtaccttttctgattcmgaattatagaaaacttgataaatacttgattttaaccaatgagactacaggcagatgggactaagtgtttatgggacaattatgtactatttaacttaaatatattttgtttaataggaaatatataataatagcattttatgtaataaaatatgggcaacgattatcttggaaattaaagagtcaaagcaaagaaatgaagggctggtaaaatgaattttgtaatatcctcaggatacttttatcttaaaagtatgttgttaaagattttgtaaattgtatttcaacaattttaaatgtgttgagcaagttgcagtgcaaacactgtcattatgtagagagtttatatgcacataataacctgtacctataaatcgtgcaataaccatatgcgactattttgccatggagaaatctgacagcattgcaaacaatagtattgtttgatgtagttaaccttaagttatttttcagtaatttcttcacaaatcaagattcaaacagctttaaacacttccaatgagataaaatatttactattatgcttattagaacaaaaggtgtttaaggatgaactaaatattttaattgagcatttatatggataatcatacattatgtaagcccatatgtatttacatccagagtcataatattttaaataaacaatcatgcagaaacttttttagggggtatactattgttttaatatcgttgccaatttngctgacttaaaatatgtgacattttaaaatcaggattttccatattng

SEQ ID NO: 22 - DNA, 807 bp, Homo sapiens
  SITE (784): n equals a,t,g, or c
gaattcggcacgagctccttcagaaatgtcttggctattcttgctctttgctcttctctgtaaatttcagcataaacttartttccataatatatgactggaaattttacagaagagttaatgtgtctaactagcaaacacgaagaaaagctcagtgttagcagttaactgagggaatgcaaatcaagaccacaaggagataacaatttgagcctattgacaaaagttcagaagtctaataatactaagtgttggagaggatatggcccagtatgatcttatccactgttggtgggagtatcaattagtacaaacactttgaaaaataagarggaattctataatatctaacatttgcatatatccatttatctctctagatctagatcttagccctctccaccctgcactgtgttcttggaaggggatcatgaatggtttccttgcattctgccttctgatttggttcagccaatgagagaccatggcaagacatttgtgagaagggtagagagtcaggtcaaggttcttagtgagatcaactctttctctgccagtttgttaactgaattctactgaaagctagagctctgttgagtaatcttttaaagctgcagctacccttttgagattaagtaatagctccctgtttgtgccttgttagggctagggatgtttaaggatccttgcccttgctagtcctagcatgttttgttgtcccataatagttctttttttaaactttcctcaattacacaatttgatcttgttcctaccagtaccnttgctggtacaaccttaaactgg

SEQ ID NO: 23 - DNA, 632 bp, Homo sapiens
  SITE (623): n equals a,t,g, or c
gaattcggcacgagtctaacagcataaagaaataacagctgcattcaagaccaggatatgtaaaataatttgtttagtttcagccactttttaaagtcaattttacaccctgaaagaaaggcaatcctgactccattgttctttcgccaataaggagatcgggaattacaataataaatagaagaaagaatgttgcttttcctcactgtaattaattttatggctcttgcgaagatgaatttttgtggtgattaaaatagtcccttgcacatattaggtactcagtaagcatttgtgaaatagggactttctagcctttatttgtgtttaaggaatcagggaataagttcaaaattgcctttcaagaaatttttggaactctcttctcactaagaaactgtaaagtcttataaaagagacattatttattttctccaagtattgcttgcgaggtgaattgaaggttttttttttatcaacagttgttttataagatcgtttgaggactaaaagggctgattgtaatcacctgtaacatgttacccagcaagacattcctcaccaggttgaagtaaaaaaaaraaatgaagtgagaatatcaagcttatgcaagtttgaaattncaaacaaga

SEQ ID NO: 24 - DNA, 1358 bp, Homo sapiens
ggcacgaggataaattgcaagtattaatcggtcccaactttaatatgggataaaaataacagtcagtatgtgacctcctaaacaatccctctactgagctgtggaggggagaagggaggtcctggggccaggacagacagggctattttcagtagtacaacttatatgctactctaagaaaagtccagaaaatgcrattctcttcatacgaagtcttarataccctcatkatttrgataaatacattttcarrtctaatatggagacagaaagctgcctagatttatacccacaagtattataaatttagagagtctgaccagcctcaattatttctcttcgaagtgggagagagaaatcaaaagtcagaaatggtggrtaatctccaagtcatatccatttggstttgrtctactacttgtttttatgcttgtatttggrgrcaaggrtgcctgatgttaagggratttcmtacmttgaataatgtgaccagactgccatctagtcaaaaacctataaaatgttatttactttaattctgggctaattcaacagaagtyyysgataaaarctctccaaacaataattatgarccttagttttttgttttgttttggatacaaaacaaaacagctctgtagttgttctgtgaggtttataaatagatttttttaactacttaattttcyggtttcygccyctgkgtttyctgtacctatagaggtagctcttttcagttaagtagagaaaagctcttcccctgggttgaaaataatgcagtcccgagaggctacttaactctacctttctggaggtcatggtagcaattggagatctcccaggcattctaaggggagctactaaagagccccagatactcaatttaccactagaaattcgcttcatctactctctgtcatctggggagraaagtattataactgacattcagtatgcacacaataagtgcataataaagagctattgaggggatccaagggagtaaaatgggtttgcccataggactccatcagggtccaccaacacagacttacagcaaaaattggaaggctcttttctgctggattctgggaatctgtgttctctagtgtgccagggagagttggaatcaaaacacgtaatataatgtttctattcagagccccatttttttgccaaataaagtagcactgtcaaataataaatcttgtattcacttgggcatgtatgtttattattggatctctaaaatatgcttcaaataatgcactgaaataagtgaggtgatgaattttgaaataataacagtttatgatgggtagctccaaaatttttaaaaaaaaaaaaaaaaaactcga

SEQ ID NO: 25 - DNA, 1376 bp, Homo sapiens
cccacctttagcgagccaacgagagaacaccgcctgcagctagaacagcctggtcaggagcgtaacggagtggtgcgccaacgtgagaggaaacccgtgcgcggctgcgctttcctgtccccaagccgttctagacgcgggaaaaatgctttctgaaagcagctcctttttgaagggtgtgatgcttggaagcattttctgtgctttgatcactatgctaggacacattaggattggtcatggaaatagaatgcaccaccatgagcatcatcacctacaagctcctaacaaagaagatatcttgaaaatttcagaggatgagcgcatggagctcagtaagagctttcgagtatactgtattatccttgtaaaacccaaagatgtgagtctttgggctgcagtaaaggagacttggaccaaacactgtgacaaagcagagttcttcagttctgaaaatgttaaagtgtttgagtcaattaatatggacacaaatgacatgtggttaatgatgagaaaagcttacaaatacgcctttgawaagtatagagaccaatacaactggttcttccttgcacgccccactacgtttgctatcattgaaaacctaaagtattttttgttaaaaaaggatccatcacagcctttctatctaggccacactataaaatctggagaccttgaatatgtgggtatggaaggaggaattgtcttaagtgtagaatcaatgaaaagacttaacagccttctcaatatcccagaaaagtgtcctgaacagggagggatgatttggaagatatctgaagataaacagctagcagtttgcctgaaatatgctggagtatttgcagaaaatgcagaagatgctgatggaaaagatgtatttaataccaaatctgttgggctttctattaaagaggcaatgacttatcaccccaaccaggtagtagaaggctgttgttcagatatggctgttacttttaatggactgactccaaatcagatgcatgtgatgatgtatggggtataccgccttagggcatttgggcatattttcaatgatgcattggttttcttacctccaaatggttctgacaatgactgagaagtggtagaaaagcgtgaatatgatctttgtataggacgtgtgttgtcattatttgtagtagtaactacatatccaatacagctgtatgtttctttttcttttctaatttggtggcactggtataaccacacattaaagtcagtagtacatttttaaaaaaaaaaaaaaaaaaaaaaaaaaaaaaaaaaaaaaaaaaaaaaaaaaaaaaaaaaaaaaaaaaaaaaaaaaaaaaaaaaaaaaaaaaaaaaaaaaaaaaaaaaaaaaaaaaaaa

SEQ ID NO: 26 - DNA, 2923 bp, Homo sapiens
  SITE (1882): n equals a,t,g, or c
  SITE (2829): n equals a,t,g, or c
  SITE (2899): n equals a,t,g, or c
  SITE (2911): n equals a,t,g, or c
ctcctcctccggggccccctcctccccctttmactggtgcagatggccagcctgctataccaccaccgctttctgataccaccaagcccaagtcctccttgcctgccgtgagcgatgcccgtagcgacctgctttcagccatccgtcaaggttttcagctgcgcagggttgakgagcagcgggaacaagagaagcgggatgttgtgggcaatgacgtggccaccatcttgtctcgtcgcattgctgttgagtacagtgactcagaagatgactcctctgaatttgatgaggacgactggtccgattaactctttctgcctgctgcccaccttctttttctttccttcctacctgccttctttgatgccaaccccaacagacccgtaggggaggaaaagggaggaaaaaagtaattttaaggggccaaagctttccctgaagcaaccaaagatatatccaagtgcttcctccaagtcaacatgtatttcctctccccattttcaggccctgtggggctcctgaggttcagtagctgggatgttccctctttccttcaagtgcctgttgcatattgaaaggaaggagaaatcccaaagcagattcctttgatcgggtttctgttggagatggggcttcccttaggagccatattcaactacagccttctaaaacctgtgccctcagccacttcgaatgccagccaccttctggttctaaaacggggagtggtctgaatgaacacagctgacccctttcccgcgcactgaaagggcagagtaggccgaaggtccaagggccagactgcctcaccctctgccctaatcagcagggtgggcctgccttttgctaagcgatctctatgcctgggatgccctttattccaggaggcatcaagcctctaaagaatgtctcacctcctctgcccaaaaatgatgcctttctgtaggctggtgttgttgcctccctcccaggatccctttggtgagtatggtgttcaggatgcaccaccaccacctctagataccttcaggcaacacagcccagttttaacctctagtatccatgaccaaactatccctgacacatgaggacaggggcctcttctggctgtcaggagcaaagcctgaagacttggagctgcaggactggaagaacagtggagccccgtgggtctcaccctttaaggatgctgaggcctagagatgggaagtgacttgctcaaggtcacacaattggatagtgacatagctagagcgcagagttcctgattccaagtcacctgtgctttctgggaccaaagaatgggcacctgctggagtccgggcagagctttctcagttgtattgctactccagacctcaccataggttggggtcccagtaggaaggctcagggtctgtgccagccctgtcggtgctgctcagaccttcatagcctctcttgtcattctttgttgccccttttctgtcaccagccaaccacatagccttgggaccagcctctctgggggaccagaagtagtgagagaaggaaggggataggcagctttgacaggtgctgctttcaattcctctgcaactcctcccccttttatttccccaatttaaacaaagattctgccaactgtggaaacttcagtccctcaggctggcagccatgccagtacctgcctgggggtggggggtgcctggcagccatgaagcaggctgaaaggcagaggggctccaggtcctgtttccagctcccctcactgcacatggtgaagctcgctccctccctccctcccttcccgcttttcccagagctaatacacaggtgctattattcagaaaaaaactggtcagctctagccaacagtgaaggtttcttttcttctgccctnaactattgtgtagcctcttatgctgaaatcggcttctgctggcttctccggctttcagagccctgaaacaaagagaaacaggatctgtccctacccagcacagcaaatggttgtagtaattgccaaagccctcataaagccctccggcttgaggagagagtgtatagtcatgggttctgcctctgtgcccttgctggccgcttctcctctgccttctttcctggaactcagggtgtggggactgagcctgtaggggacagcatgccgtcttgctgtggccactcccaagtgtgccctcttccctctttacacatcaggtgtctctggcacaggacttggcactaagctccatgctgagacaccaggctatgtgggcccccaccttgtttcccagcctgcaccttagaagccgaagtgctttcatcagaaccctaaaatggtcgttgaaggcgcctgggccgcagccagcagtagttggagaggcaggcagagggcagtggttctcccaaataggagacctggggcctggccaggcagggtttgggcctaatggctttgactaaattacccccatcctccttgcccggaaaagggagagctagagccactcactgtcattctgctctgaccttgaagggggcggtgttggcctggcttctggaatggactgagtccatcgtggaaagggctgggggcaggaggaggtggggaggggcactgcctgcggaaggtaggattagatcattagctcagtgacctcctagggtttcgatgtgctatgttctcatcctacagttggtttggtaatgatctgcaagtcccggagagcaacagcacagctctgcctgacgctctcattaaaatctatgcagccaagctcggcactttgtagcagccggccttgcgaagcctcctcagctcggggggccggggacccagtgagccgnagakcstctgggctccacttatgcatatgcaccaaaaaaaaaaaaaaaaaaaaaaggggggccgctctanaaggattcctcnaaggggcccaag

SEQ ID NO: 27 - DNA, 2954 bp, Homo sapiens
acggtggaaacacccaactcgatttattgaaaaactrttacagttaattattcctttgttacacaagtttagaatattttaagatatcctttcctgggcattacagttaaaacttatgacatgtctagcggattttttgaaamcgtacaatgtgtcatttgacattgtatttcaaaaggcctgatgtcctcgaaactttatcttgggttttttgcttaccatttttttctttttgccagcgtttgtccaattatatatattgagaggaaaaaataaaattacaccaaaagaatttctgcaaatataagaagtaattttattgcaatatactgtggctagagtggtctggggagaacgggacacattttgaagttcagtacaaattataacaactttgaagggaccacagaggaagaaaatgacaggagaaaaggacaaattggatgggatgagaaatgaaaacagaatcacatgacctagacgcagtccacgggggtcgcgggacagtcctcggctatggcttttcttttgaagagatgaaggtgacagtcattggcacatgctggcatcctgggctccagagactctccaagccagacttttctttggcaagagcgagacttactttccagggaaatttggaaaatccacgctggcggtgttttgttcctcctgggtggcttgtttgtggcttcctaagctggaactgcattctggtggtggtgggggtcggggacagcaccagagccccgcaggctcaccccaagggcccagcctgcatttcccatggtagaaggaaaaggcgctgcacccgggcaacttttcacagtgaagagatcgcctttcctggctgcccctcgggtcctcctgcccacagacggcagccccccgacctcgatggccaggaaagggttccccaaaggggacctcacccgccccgagctctggagccgctgacgctcgcatccaggacatttgagatgggaatccaaataggctacttggaaaagacgtgctgcaggcagccctggagagactcatggagttcattgtacattactccatctaccgaggcagcgcatggcatgactgaacggcttggaacaaacacagaaattagcaccacaaacattcaggaaccaaatataatctgctatggtcacaccacagacaatgcaggaagaggctttttattgcttgtgtgtgttttcaaatcaagtaggcacaacccagtcctcataacagccctcgggagtggacgcaccggggcgggagagcgcaggagggagtgtgcttggctatcctgcccagtggaaaggaaagtgacgtgcattgatcttagagtccttggcaacagactgtggaggcaataacaggataaagaaagcagggagaacgaggcatggccagggwccccagtgcgccttcaaggagaccttaaaacagatagcaccacaagagagccacaagagagaagtgtaaaaaataagcaccaattttcattgagttatcacctacaaaaaatgtggtttccctgccctggacattctcccatcaggctctgcgggaagaaaagcggaaaaaggaagcaaataaaattaatccaaacctgtgttttagtcttaagtgcatgtagaaaaaagaaaattatcaaattttttccctccctattaaaaaaaaaaaagtctagagcgaatcaaaaactgtctgaaaaggggcactggtacctgcttttcaatggcagcataaattcttgctgccccggggcaaacttccaatttattgcacgttcttggccagggckggggtggggagacttcctatttctaatcagaacggtactgcaacccagaatccatgcctcgcccattctgtccgtgggactgagactgggtttccgtgcatgattgaaagccaggcacacttaacatttataacaatacaatacaaatatttacttaaaactcacaaaaacataagcacctttaatccatcgggaaggcacctgcagaatgacatttggcctctaaatggatcgtgttggaggttgttaaaaacggaggctttggtgatggtgggatgacctttacgaggcttaccttggaacattttttgaaggtcaggggaaatacacatcttcaagttgaatttagaaaaaaatatagtgtccaaatctggcagtccctcccccaacccctgagacctattcacgaacaggatgggtcgggcgagctggggggctggaggcatggccccgctcccggggcgcatgggtgtggacagagcgtggggcgggcccaggcgctggggtgcagctaggtcatgtgattcagctccaggtgggggcgcggctccttccctctgttctctccgggctggggtcccacaccccgtggtgccgaggcgtagatgaagtcaggtgggaggggagggagaagccttcactgtccaggatcaggacgtgcacgggacactcacgaacgaatggcatgctgaggtcacgaggttgctctcgggagcccgggctcggcggctcctagcccatgaagcaagccggccccacttcaaatccaaatttctgtgacgcttcaccgaagtcattgaacatgatgtccacgatgggcacctgctccactttgggggtgtcgatctccagaaccgtcttctggtagcctttcttggtagcacagccgtccaccagggcgcggatgtaggggttgttgtcataggacatctcctcgtcgttggagcccaggaagcggagggccttgtcgtagctgcccgtggctgcgtcctgccaggccactgactggtagcagtggtaggtgacgttctggtgggcagaggcgctcagcagccgcaggaaggtcatctgtggtcttctcgggggaactacctggaaacgcactgtacccacagacccggccgaggccagcgcacatcggacgcgtggg

SEQ ID NO: 28 - DNA, 534 bp, Homo sapiens
  SITE (456): n equals a,t,g, or c
  SITE (489): n equals a,t,g, or c
  SITE (527): n equals a,t,g, or c
gaattcggcacgagcaagggtggaacctgagtctgcttgtctgtttgccccatgacagcccaggggtggtggsctcaccccacctccaggcamccacaagaatataaaatcttgtacaargatgtcgatattactattgscattcccaagtgcacctgcacctgtagtatcaggtggtttgcagccttggctgcatagctgcatatgagaatcacctgggaagcttttaaaaatcccagtatccccacctcttccccagttacagtggagtcttgcgggtggtgggggacatcaattatttttgaaagctccmaagtaattctggtgtgcagtggggtgaccagctgtcccagggamctcctttaaaaaataatatcccgggcacatgacaggccaattgccctaatgcaaccaaggttaagaactactggtttaatgggaaaatatttttttccngtgcttgaataatactggttttattaaactccngaatcccatttctttccttgccaaattttttaaaggcnaaaaaaa

SEQ ID NO: 29 - DNA, 1827 bp, Homo sapiens
  SITE (1): n equals a,t,g, or c
  SITE (2): n equals a,t,g, or c
  SITE (4): n equals a,t,g, or c
  SITE (13): n equals a,t,g, or c
  SITE (1768): n equals a,t,g, or c
  SITE (1787): n equals a,t,g, or c
  SITE (1811): n equals a,t,g, or c
nncngcacgagcncggtcctgtcccgtcagcgtcccgccagccagctccttgcacccttcgcggccgaggcgctccctggtgctccccgcgcagccatggctcagcacttctccctggccgcctgcgacgtggtcggattcgacctggaccacactctgtgtcgctacaacctgcccgagagcgccccgctcatttataatagctttgcccagttcctagttaaggagaaagggtacgataaggaattgctcaatgtgaccccagaggattgggatttctgttgcaaaggtttggcattggatctagaagatgggaacttccttaaacttgcaaataatggcactgttctcagggcaagccatggcaccaagatgatgactccagaggtgctggcagaggcatatggcaagaaagagtggaagcacttcttgtcggacactggaatggcttgccgctcaggaaagtattacttttacgacaactactttgacctgccaggagctcttctgtgtgccagggtggtggactatttaacaaaactgaacaatggtcaaaaaacatttgatttttggaaggatatagttgctgctatacaacacaattataaaatgtcagcttttaaggaaaactgtggaatatattttccagaaataaaaagagatccaggcagatatttacatagttgtcctgaatctgtgaaaaaatggcttcgacagctaaagaatgctgggaaaattcttctgttaattaccagttctcacagtgattactgtagacttctctgcgaatatattcttgggaatgattttacagacctttttgacattgtgattacaaatgcattgaagcctggtttcttctcccacttaccaagtcagagacctttccggacactcgagaatgatgaggagcaggaggcactgccatctctggataaacctggctggtactcccaagggaacgctgtccacctctatgaacttctgaagaaaatgactggcaaacctgaacccaaggttgtttattttggtgacagcatgcattcagatattttcccagctcgtcactatagtaattgggagacagtcctcatcctggaagaactcagaggggatgaaggcacgaggagtcagaggcctgaggagtcagagcctctagagaagaaaggaaaatatgagggaccaaaagcaaaacctttaaatacttcatctaaaaaatggggctctttttttattgattcagttttgggactggaaaatacagaagactccttggtttatacatggtcttgtaagagaatcagtacttacagcactattgcaattccaagtattgaagcaatcgcagaattacctctggactacaaatttacaagattctcttcaagcaattcaaaaacagctggctactatccaaatcctccactggtcttatcaagtgatgagacactgatatccaaataagttgtctttactgaaaaatgaagtgaagacccatatatgcagttaaaaaaaagttaattttcaaaaaatactgtaaaagactttaaggaacaagttttattgaccaataagttgatatttgtccataggtctcctttctataaatcatcttgatgtttaacaactcttattatattaaaatctcagtatcctaaaacttaggaaccttattggatattttctattacagtagttttgtggttgggattcacccgggggggccacacactcacacggcacagttcactctttacacatatggccncggtcccgtggggttctcnaaggtgtggttcccttggggcctnttgggcttgggccttt

SEQ ID NO: 30 - DNA, 1479 bp, Homo sapiens
  SITE (115): n equals a,t,g, or c
  SITE (1475): n equals a,t,g, or c
ggcacgagggcgggtggcatcagcagaggggcaccagccaaagggtgtggctacctcactgctggtccccaggcccgggaggtggggagcacacacagtgccttgggtacccagntgggtgttctcccgctgcagaggagacrgcagcctgggtcctgcccttcacctctggcggctttctctacatcgccttggtgaacgtgctccctgacctcttggaagaagaggacccgtggcgctccctgcagcagctgcttctgctctgtgcgggcatcgtggtaatggtgctgttctcgctcttcgtggattaactttccctgatgccgacgcccctgccccctgcagcaataagatgctcggattcactctgtgaccgcatatgtgagaggcagagagggcgagtggctgcgagagagaatgagcctcccgccagacaggagggaggtgcgtgtggatgtatgtggtgtgcacatgtggccagaggtgtgtgcgcgagaccgacactgtgatccctgtgctgggtccggggcccagtgtagcgcctgtccccagccatgctgtggttacctctccttgccgccctgtcaccttcacctcctggagtaagcagcgaggaagagcagcactggtcccaagcagaggccttgccctgctgggaccccgggagtgagagcagcccaaggatcccagggtgcagggaactccagagctgcccacctcccactgccccctcagcacacacacagtccccaggcggcctaggggccaaggctggggcggctttggtcccttttcctggcccttccttccccacttctaagccaaagaaaggagaggcaggtgctcctgtaccccagccccactcagcactgacagtccccagctcctagtagtgagctgggaggcgcttcctaagaccctttcctcagggctgccctgggagctcattcctggccaacacgccctggcagcaccagcagctcttgccacctccagctgccaaacagcagcctgccgggcagggagcagccccaggccagagaggcctcccggtccagctcagggatgctcctgccagcacaggggccagggactcctggagcaggcacatagtgagcccgggcagccctgcccagctcaggcccctttccttccccattgaggttggggtaggtgggggcggtgagggctccacgttgtcagcgctcaggaatgtgctccggcagagtgctgaagccataatccccaaccatttcccttggctgacgcccaggtactcagctggcccactccacagccaggcctgccctgcccttcaccgtggatgttttcagaagtggccatcgagaggtctggatggttttatagcaactttgctgtgattccgtttgtatctgtaaatatttgttctatagataagatacaaataaatattatccacataaaaaaaaaaaaaaaaaaacttgggggggggncccg

SEQ ID NO: 31 - DNA, 987 bp, Homo sapiens
  SITE (982): n equals a,t,g, or c
  SITE (984): n equals a,t,g, or c
ggcacgagcgcaatcgcgtttccggagagacctggctgctgtgtcccgcggcttgcgctccgtagtggactccgcgggccttcggcagatgcaggcctggggtagtctcctttctggactgagaagagaagaatggagaagcccctcttcccattagtgcctttgcattggtttggctttggctacacagcactggttgtttctggtgggatcgttggctatgtaaaaacaggcagcgtgccgtccctggctgcagggctgctcttcggcagtctagccggcctgggtgcttaccagctgtatcaggatccaaggaacgtttggggtttcctagccgctacatctgttacttttgttggtgttatgggaatgagatcctactactatggaaaattcatgcctgtaggtttaattgcaggtgccagtttgctgatggccgccaaagttggagttcgtatgttgatgacatctgattagcagaagtcatgttccagcttggactcatgaaggattaaaaatctgcatcttccactattttcaatgtattaagagaaataagtgcagcatttttgcatctgacattttacctaaaaaaaaaaagacaccaaatttggcggaggggtggaaaatcagttgttaccattataaccctacagaggtggtgagcatgtaacatgagcttattgagaccatcatagagatcgattcttgtatattgattttatctctttctgtatctataggtaaatctcaagggtaaaatgttaggtgttgacattgagaaccctgaaaccccattccctgctcagaggaacagtgtgaaaaaaaatctcttgagagatttagaatatcttttcttttgctcatcttagaccacagactgactttgaaattatgttaagtgaaatatcaatgaaaataaagtttactataaataawaaaaaaaaaaaaaaaaaaaaaaaaaaaaaaaaaaaaaaaaaananaaa

SEQ ID NO: 32 - DNA, 2933 bp, Homo sapiens
  SITE (43): n equals a,t,g, or c
  SITE (1237): n equals a,t,g, or c
tctacctccgagtagtattagactgtaaacacagtaatatagncgccatcattcgtgaaggggtttcttttgcgggacagaggatcagatgttgagagtttggacaaactcatgaaaaccaaaaatatacctgaagctcaccaagatgcatttaaaactggttttgcggaaggttttctgaaagctcaagcactcacacaaaaaaccaatgattccctaaggcgaacccgtctgattctcttcgttctgctgctattcggcatttatggacttctaaaaaacccatttttatctgtccgcttccggacaacaacagggcttgattctgcagtagatcctgtccagatgaaaaatgtcacctttgaacatgttaaaggggtggaggaagctaaacaagaattacaggaagttgttgaattcttgaaaaatccacaaaaatttactattcttggaggtaaacttccaaaaggaattcttttagttggacccccagggactggaaagacacttcttgcccgagctgtggcgggagaagctgatgttcctttttattatgcttctggatccgaatttgatgagatgtttgtgggtgtgggagccagccgtatcagaaatctttttagggaagcaaaggcgaatgctccttgtgttatatttattgatgaattagattctgttggtgggaagagaattgaatctccaatgcatccatattcaaggcagaccataaatcaacttcttgctgaaatggatggttttaaacccaatgaaggagttatcataataggagccacaaacttcccagaggcattagataatgccttaatacgtcctggtcgttttgacatgcaagttacagttccaaggccagatgtaaaaggtcgaacagaaattttgaaatggtatctcaataaaataaagtttgatcawtccgttgatccagaaattatagctcgaggtactgttggcttttccggagcagagttggagaatcttgtgaaccaggctgcattaaaagcagctgttgatggaaaagaaatggttaccatgaaggagctgggagttttccaaagacaaaattctaatggggcctgaaagaagaagtgtggaaattgataacaaaaacaaaaccatcacagcatatcatgaatctggtcatgccattattgcatattacacaaaagatgcaatgcctatcaacaaagctacaatcatgccacgggggccaacacttggnacatgtgtccctgttacctgagaatgacagatggaatgaaactagagcccagctgcttgcacaaatggatgttagtatgggaggaagagtggcagaggagcttatatttggaaccgaccatattacaacaggtgcttccagtgattttgataatgccactaaaatagcaaagsggatggttaccaaatttggaatgagtgaaaagcttggagttatgacctacagtgatacagggaaactaagtccagaaacccaatctgccatcgaacaagaaataagaatccttctaagggactcatatgaacgagcaaaacatatcttgaaaactcatgcaaaggagcataagaatctcgcagaagctttattgacctatgagactttggatgccaaagagattcaaattgttcttgaggggaaaaagttggaagtgagatgataactctcttgatatggatgcttgctggttttattgcaagaatayaagtagcattgcagtagtctacttttacaacgctttcccctcattcttgatgtggtgtaattgaagggtgtgaaatgctttgtcaatcatttgtcacatttatccagtttgggttattctcattatgacacctattgcaaattagcatcccatggcaaatatattttgaaaaaataaagaactatcaggattgaaaacagctcttttgaggaatgtcaattagttattaagttgaaagtaattaatgattttatgtttggttactctactagatttgataaaaattgtgcctttagccttctatatacatcagtggaaacttaagatgcagtaattatgttccagattgaccatgaataaaatattttttaatctaaatgtagagaagttgggattaaaagcagtctcggaaacacagagccagggaatatagccttttggcatggtgccatggctcacatctgtaatcccagcacttttggaggctgaggcgggtggattgcttgaggccaggagttcgagaccagcctggccaacgtggtgaaacgctgtytctactaaaatacaaaaaaatagggctgggcgcggttgctcacgcctgtaatcccagcacttttcagaggccaaggcgggcaaatcacctgaggtcaagagtttgagaccagcctggccaacatggtgaaaccccatctctactaaacatgcaaaaattacctgggcatggtggcaggtgcttataatcccagctactctgggggccaaggcaggagaattgcttgagcctgggagatggaggttgcagtgagctgagatcatgccactgcactccagcctgggcaacagagcaagactctgcctcaaaaaaaaattaaaataaatttaaatacaaaaaaaaatagccaggtgtggggtgcatgcctggaatcccagctacttgagaggctgaggcacgagaattgcttgaacccaggaggtggaggttgcagtgagccaagatcacaggagccactgcactccagcctgggtgacagagtgagactctgtctcaaaamaaaattaaataaattattataacctttcagaaatgctgtgtgcattttcatgttcttttttttagcattactgtcactctccctaatgaaatgtacttcagagaagcagtattttgttaaataaatacataacctcaaaaaaaaaaaaaaaaaaaaaactcga

SEQ ID NO: 33 - DNA, 1366 bp, Homo sapiens
  SITE (1176): n equals a,t,g, or c
gggaatacctattctcctttaccgtgtgtcttttccccctggaattgagccagcaagttcttggcatggcaggtgtttctgaaatatcagtgtgtttttytttgctttctttgttttccttgttttgctctttctattttcctaagcaggcaactccaaaaagagatttgtttgtgcaggagtcaggaaaagggaagaggaatactgaaagctgggagtagggcaggacagaagagggggaggagtctattttcattgtgtaagtkttgaacttccaccaatgccaaagtcacggacatgtgtgcagttggatgtkcgagttagagcagccccaagggcctgtaacctgaatagcaggcactcacccagctgataactcaagttccaaatggaccacagctgagttgtaggggatgtgtgtgtgtgtgtacgcgtgcgtttgagattcctggaacagatttcctctgagatctcaacaggctttttcattatcattggggagctatggtttctcttatttcacaaggcccatttcttccttttgagatgtgcaaggagatgactccatccatgacttggctttacactctccctccttggctttttatcatcagtgcagragarattcttgctcgttcttcaaacaatctcattcgagctttataaagattattggartttaaataatattcatatctatggcctagaacaatgttcctcaagtatgcgtcagaatcatgagtggtagagggaggattataatgtagtttcctacatttctacctcccaccaccctggagtctgcattttaacgtacttctgtytgaggatcagaytttgggaagcgttgggcttgagatgttttctkgacattgatttatgttgagaccagaccaagaagcagatggatggacatgatcagttcataaacatgttcctttcttagggtcaaattggaggaggctctagagaagcactgtccaatagaaatataatgccaacaatatatgtwattttaagtcttctattggtgcatttaaaaagtaaaagaaggctgagtggctgggcatggctcctcgtgcctgtaatcccagcactttgggaggccggggtgggcagatcacctgaggtcaggagttcgagaccagcctgcccaacatggtgaaaccccatatntactaaaaatacaaaaaattaaccgggcatagtggcaggtgcctgtaatcccagctactcgggaggctgaggcaggagaatcgcttgaacctgggaggcagagactgcagtgagctgagatcgtgccactacactccagcctgggtgatgagcgaaactccgtctcaaaaaaaaaaaaaaaaaaactcga

SEQ ID NO: 34 - DNA, 667 bp, Homo sapiens
  SITE (430): n equals a,t,g, or c
  SITE (666): n equals a,t,g, or c
  SITE (667): n equals a,t,g, or c
attttcggcacaggccggaagctacctatctggtagggagctcccccagcaccgaagactgcgatgacttctgcrctgacccaggggctggagcgaatcccagaccagctcggctacctggtactgagtgaaggtgcagtgctggcgtcatctggggacctggagaatgatgagcaggcagccagtgccatctctgagctggtcagcacagcctgcggtttccggctgcaccgcggcatgaatgtgcccttcaagcgcctgtctgtggtctttggagaacacacactgctggtgacggtgtcaggacagagggtgtttgtggtgaagaggcagaaccgaggtcgggagcccattgatgtctgagcctgccggagggcgagggtcggagaagcggattgggtcctgggcctctgtgatgaggcaggcacanctgtcggtcttggcttgctgctagaactagggccttctgctcgcccacctcccacccctacctggacgggcccaggcttggggactctgagctgtgttaaggagaacaagggcaaggagacctccctttgtgctccctcactccctaataaacatgagtctgatgttctccarmmmaaaaaaaaaaaaaaaaaaaaaaaaaaaaaaaaaaaaaaaaaaaaaaaaaaaaaaaaaaann

SEQ ID NO: 35 - DNA, 1710 bp, Homo sapiens
  SITE (304): n equals a,t,g, or c
  SITE (638): n equals a,t,g, or c
  SITE (948): n equals a,t,g, or c
ggcacgagccagagcaggctgctaggcctggggccaccactgcccctgggtgctacacccagtgtgctgggtcactgggaacttcctgaagtggtgtcacctgaactgggcccccaaggatggggtgcgggcagtaccgcaggaagaggagcagcccctgtgaagattgagagctgccagaggctctgtgattggctgcggcacgatgacccgcgcacggattggctgcttcgggccggggggccgggcccgggggacagaatccgcccccgaaccttcaaagagggtaccccccggcaggagntggcagaccttaggaggtgcgacagacccgcggggcaaacggactggggccaagagccgggagcgcgggcgcaaaggcaccagggcccgcccagggcgccgcgcagcacggccttgggggttctgcgggccttcgggtgcgcgtctcgcctctagccatggggtccgcagcgttggagatcctgggcctggtgctgtgcctggtgggctgggggggtctgatcctggcgtgcgggctgcccatgtggcaggtgaccgccttcctggaccacaacatcgtgacggcgcagaccacctggaaggggctgtggatgtcgtgcgtggtgcagagcacngggcacatgcagtgcaaagtgtacgactcggtgctggctctgagcaccgaggtgcaggcggcgcgggcgctcaccgtgagcgccgtgctgctggcgttcgttgcgctcttcgtgaccctggcgggcgcgcagtgcaccacctgcgtggccccgggcccggccaaggcgcgtgtggccctcacgggaggcgtgctctacctgttttgcgggctgctggcgctcgtgccactctgctggttcgccaacattgtcgtccgcgagttttacgacccgtctgtgcccgtgtcgcagaagtacgagctgggcgcangctgtacatcggctgggcggccaccgcgctgctcatggtaggcggctgcctcttgtgctgcggcgcctgggtctgcaccggccgtcccgacctcagcttccccgtgaagtactcagcgccgcggcggcccacggccaccggcgactacgacaagaagaactacgtctgagggcgctgggcacggccgggcccctcctgccagccacgcctgcgaggcgttggataagcctggggakccccgcatggaccgcggcttccgccgggtagcgcggcgcgcaggctcctcggaacgtccggctctgcgccccgacgcggctcctggatccgctcctgcctgcgcccgcagctgaccttctcctgccactagcccggccctgcccttaacagacggaatgaagtttccttttctgtgcgcggcgctgtttccataggcagagcgggtgtcagactgaggatttcgcttcccctccaagacgctgggggtcttggctgctgccttacttcccagaggctcctgctgacttcggaggggcggatgcagagcccagggcccccaccggaagatgtgtacagctggtctttactccatcggcaggcccgagcccagggaccagtgacttggcctggacctcccggtctcactccagcatctccccaggcaaggcttgtgggcaccggagcttgagagagggcgggagtgggaaggctaagaatctgcttagtaaatggtttgaactctcaaaaaaaaaaaaaaaaaaaaaa

SEQ ID NO: 36 - DNA, 1096 bp, Homo sapiens
  SITE (1086): n equals a,t,g, or c
  SITE (1093): n equals a,t,g, or c
ggccagtgggcagggtcacagggcaaggtcccgcgggccgctgggtgcggcgacttccgtgctcccggcgagcgggcggagagcgggggccgcactggggagtgtgggctgggccgcagatgtcatgtggcctgtkttttggaccgtggttcgtacctatgctccttatgtcacattccctgttgccttcgtggtcggggctgtgggttaccacctggaatggttcatcaggggaaaggacccccagcccgtggaggaggaaaagagcatctcagagcgccgggaggatcgcaagctggatgagcttctaggcaaggaccacacgcaggtggtgagccttaaggacaagctagaatttgccccgaaagctgtgctgaacagaaaccgcccagagaagaattaatggaggacacagggccctatggtcctactgtgggtggtgacttgtcctgctaccatgttgacagagccccagaacccacatctaattggctttgttgcttattctggcccttcccacaccacacagccacacaaatactggctgctccttgatggccaggcagacccagcagcagccgaggggccagtgaagaggaaggccgcatctgttgtgtggtggccacaagcactcaggcatctgagtttactggtgcactgctgggaggagagttatgagatgaacattggctgtcaatctctgtgggcaggcggtttggcctctagtgggaatggctgggatttgggcgttgcctttaggagggatacctgcatgtctagttccagtctgcactggaaagaattcaaatatgcacctggctcccttcactattttgccctatcctttgtgctcattcttactgaaatctgtcttgtcagctcaggaatgggattcccccaggaaggaaagcacttttctgttctgggaagcccagactgttcactttggggcagggacgaacatgtgcctcgtgaatttgcttgaaaacagtcaccatcttctacccccatcactgtatagtgaaaaacctgattaaagtggtatctgagaaccawaaaaaaaaaaaaaaaaaaaaaaaaaaaaanggggggnccc

SEQ ID NO: 37 - DNA, 2279 bp, Homo sapiens
ggtgggcaaggggctcagctcgcagcgcatgcccgcgcacaggttcgtgctggccgtgggcagcgccgtctttaatgccatgttcaacgggggmatggccacaacatccacggagattgagctgcccgacgtrgaacccgccgccttcctcgcactgctcaagtttctctactcggacgaggtgcagattggcccggagacggtgatgaccacgstatacaccgccaagaagtacgcggtgccagcgctcgaggcccattgcgtggagttcctgaagaagaacctgcgagccgacaacgccttcatgctgctcacgcaggcgcgactcttcgatgaaccgcagctggccagcctgtgcctggagaacatcgacaaaaacactgcagacgccatcaccgcggagggcttcaccgacattgacctggacacgctggtggctgtcctggagcgcgacacactgggcatccgtgaggtgcggctgttcaatgccgttgtccgctggtccgaggccgagtgtcagcggcagcagctgcaggtgacgccagagaacaggcggaaggttctgggcaaggccctgggcctcattcgcttcccgctcatgaccatcgaggagttcgctgcaggtcccgcacagtcgggcatcctggtggaccgcgaggtggtcagcctcttctgcacttcaccgtcaaccccaagccacgagtggagttcattgaccggccccgctgctgcctgcgtgggaaggagtgcagcatcaaccgcttccagcaggtggagagtcgctggggctacagsgggaccagtgaccgcatcaggttctcagtcaacaagcgcatcttcgtggtgggatttgggctgtatggatccatccacgggcccaccgactaccaagtgaacatccagattattcacaccgatagcaacaccgtcttgggccagaacgacacgggcttcagctgcgacggctcagccagcaccttccgcgtcatgttcaaggagccggtggaggtgctgcccaacgtcaactacacggcctgtgccacgctcaagggcccagactcccactacggcaccaaaggcctgcgcaaggtgacacacgagtcgcccaccacgggcgccaagacctgcttcaccttttgctacgcggccgggaacaacaatggcacatccgtggaggacggccagatccccgaggtcatcttctacacctaggctgcccgacaccgacaccgccctccctccgtggggatagccgcagccccaggccatcatctgctgctggggyccccccaccacgcggtgccaggcccagtgtcccccaggccgtctgtccactccatgccacctttctcagcatcaggacggggttgccctgtgttcaccacgagtktggctgctggatcagggcagccggggaggtggccaggccagtggccaggccctgtggagacaatccctcaggactagggacagggctgtgccggcctgggccagggcccacggacccgcagctcagggcgcctgcccacgtcgtctgccggcggtgcgccgcgggcgtccctcgcgtctcttcactgcacattgcaatgcatttgcgattcccatttctctgctaggagccagcctgggtggcgctgctcccagagccgtgggtcccagaccttgcgttccttttgttcctgtccgtttatcaggacacgggccccacctgtcacgtgcccgaggccacccaagcccagcctgcggggcgttcccactgcctggatgccggcttgagttctgcgcacgcaggattcagtgtggggacggcccctgccggataggcctagccctggcccaggtggtgagcggtttgcagtgtccgttctcatccacctgatgggcccagataaaggcccccgctgtccagcctccctggacggccctcgcggtccctgcagcccaagatgggactcagaccctgtgccccagagctcccctgccgcagaatggggccccagccggccccgaccgggtccaggagcactgctcgcctgtacatactgttgccctagcccacctggtgccgtgggagccacccccaggtgctggggcacagcccctccccactccggccacgcccccacccaccccgcgtgtttctgccctgtgactcctggaacctgcgtcctccccaaagccatgggaggggtgtcctcctcagaccatgcccccagatgatttttttaaataaagaaacaaatgcacctgcaaaacaaaaaaaaaaaaaaaaaactcga

SEQ ID NO: 38 - DNA, 736 bp, Homo sapiens
gtacaggactgagaagcagataacaagagtgacgctcacagggctgggctgacgctaacaggaggcagtgtgtggctcgaagattcttgaacccacagcagcagctgcggccaccccatcctgcccacagctccagccctgagacgacgaggaggagagtcgactttgcctcttgcccaagggaccatgcccaggtgccggtggctctccctgatcctcctcaccattcccctggccctggtggccaggaaagacccaaaaaagaatgagacgggggtgctgaggaaattaaaacccgtcaatgcctcaaatgccaacgtgaagcagtgtctgtggtttgccatgcaagaatacaacaaagagagcgaggacaagtatgtcttcctggtggtcaagacactgcaagcccagcttcaggtcacaaatcttctggaataccttattgatgtagaaattgcccgcagcgattgcagaaagcctttaagcactaatgaaatctgcgccattcaagaaaactccaagctgaaaaggaaattaagctgcagctttttggtaggagcacttccctggaatggtgaattcactgtgatggagaaaaagtgtgaagatgcttaatggtgttttgaggcatccctccaacctctgtgactactttatccatgaaaatgaagcaatggcaggtgggaggctcttcccaatgtgctttcttcaaaaaaaaaaaaaaaaaaaaaaaaaa

SEQ ID NO: 39 - DNA, 1718 bp, Homo sapiens
ccccataggcaggaggcccccgggcagcacatcctgtctgcttgtgtctgctgcagagttctgtccttgcattggtgcgcctcaggccaggctgcactgctgggacctgggccatgtctccccaccccaccgccctcctgggcctagtgctctgcctggcccagaccatccacacgcaggaggaagatctgcccagaccctccatctcggctgagccaggcaccgtgatccccctggggagccatgtgactttcgtgtgccggggcccggttggggttcaaacattccgcctggagagggagagtagatccacatacaatgatactgaagatgtgtctcaagctagtccatctgagtcagaggccagattccgcattgactcagtaagtgaaggaaatgccgggccttatcgctgcatctattataagccccctaaatggtctgagcagagtgactactggagctgctggtgaaagaaacctctggaggccsggactccccggacacagagcccggctcctcagctggacccacgcagaggccgtcggacaacagtcacaatgagcatgcacctgcttcccaaggcctgaaagctgagcatctgtatattctcatcggggtctcagtggtcttcctcttctgtctcctcctcctggtcctcttctgcctccatcgccagaatcagataaagcaggggccccccagaagcaaggacgaggagcagaagccacagcagaggcctgacctggctgttgatgttctagagaggacagcagacaaggccacagtcaatggacttcctgagaaggacagagagacggacacctcggccctggctgcagggagttcccaggaggtgacgtatgctcagctggaccactgggccctcacacagaggacagcccgggctgtgtccccacagtccacaaagcccatggccgagtccatcacgtatgcagccgttgccagacactgaccccatacccacctggcctctgcacctgagggtagaaagtcactctaggaaaagcctgaagcagccatttggaaggcttcctgttggattcctcttcatctagaaagccagccaggcagctgtcctggagacaagagctggagactggaggtttctaaccagcatccagaaggttcgttagccaggtggtcccttctacaatcgagcagctccttggacagactgtttctcagttatttccagagacccagctacagttccctggctgtttctagagacccagctttattcacctgactgtttccagagacccagctaaagtcacctgcctgttctaaaggcccagctacagccaatcagccgatttcctgagcagtgatgccacctccaagcttgtcctaggtgtctgctgtgaacctccagtgaccccagagactttgctgtaattatctgccctgctgaccctaaagaccttcctagaagtcaagagctagccttgagactgtgctatacacacacagctgagagccaagcccagttctctgggttgtgctttactccacgcatcaataaataattttgaaggcctcacatctggcagccccaggcctggtcctgggtgcataggtctctcggacccactctctgccttcacagttgttcaaagctgagtgagggaaacaggacctacgaaaaaaaaaaaaaaaaaaatcgagggggggcccgtacccaatcgcctgta

SEQ ID NO: 40 - DNA, 1966 bp, Homo sapiens
gtcgcgcctgcaggtcgacactagtggatccaaagaattcggcacgagctggggagcgggactsgagaatactgcccagttactctagcgcgccaggccgaaccgcagcttcttggcttaggtacttctactcacagcggccgattccgaggccaactccagcaatggcttttgcaaatctgcggaaagtgctcatcagtgacagcctggacccttgctgccggaagatcttgcaagatggagggctgcaggtggtggaaaagcagaaccttagcaaagaggagctgatagcggactgcaggactgtgaaggccttattgttcgctctgccaccaaggtgaccgctgatgtcatcaacgcagctgagaaactccaggtggtgggcagggctggcacaggtgtggacaatgtggatctggaggccgcaacaaggaagggcatcttggttatgaacacccccaatgggaacagcctcagtgccgcagaactcacttgtggaatgatcatgtgcctggccaggcagattccccaggcgacggcttcgatgaaggacggcaaatgggagcggaagaagttcatgggaacagagctgaatggaaagaccctgggaattcttggcctgggcaggattgggagagaggtagctacccggatgcagtcctttgggatgaagactatagggtatgaccccatcatttccccagaggtctcggcctcctttggtgttcagcagctgcccctggaggagatctggcctctctgtgatttcatcactgtgcacactcctctcctgccctccacgacaggcttgctgaatgacaacacctttgcccagtgcaagaagggggtgcgtgtggtgaactgtgcccgtggagggatcgtggacgaaggcgccctgctccgggccctgcagtctggccagtgtgccggggctgcactggacgtgtttacggaagagccgccacgggaccgggccttggtggaccatgagaatgtcatcagctgtccccacctgggtgccagcaccaaggaggctcagagccgctgtggggaggaaattgctgttcagttcgtggacatggtgaaggggaaatctctcacgggggttgtgaatgcccaggcccttaccagtgccttctctccacacaccaagccttggattggtctggcagaagctctggggacactgatgcgagcctgggctgggtcccccaaagggaccatccaggtgataacacagggaacatccctgaagaatgctgggaactgcctaagccccgcagtcattgtcggcctcctgaaagaggcttccaagcaggcggatgtgaacttggtgaacgctaagctgctggtgaaagaggctggcctcaatgtcaccacctcccacagccctgctgcaccaggggagcaaggcttcggggaatgcctcctggccgtggccctggcaggcgccccttaccaggctgtgggcttggtccaaggcactacrcctgtactgcaggggctcaatggagctgtcttcaggccagaagtgcctctccgcagggacctgcccctgctcctattccggactcagacctctgaccctgcaatgctgcctaccatgattggcctcctggcagaggcaggcgtgcggctgctgtcctaccagacttcactggtgtcagatggggagacctggcacgtcatgggcatctcctccttgctgcccagcctggaagcgtggaagcagcatgtgactgaagccttccagttccacttctaaccttggagctcactggtccctgcctctggggcttttctgaagaaacccacccactgtgatcaatagggagagaaaatccacattcttgggctgaacgcgggcctctgacactgcttacactgcactctgaccctgtagtacagcaataaccgtctaataaagagcctacccccaaaaaaaaaaaaaaaaaaaaaaactcga

SEQ ID NO: 41 - DNA, 972 bp, Homo sapiens
  SITE (564): n equals a,t,g, or c
ggcacgagccaagtggtcccccagacaaggctcaggatgtccacatccactgcatcctggaccctgtgcaggtgaagatgtcccgacccacgcatactcctctttcgcctgccaccatttctccaaccatcacagtagcagtcttcttcgctgtgttcgtcgccgccgccgccgccaccgccgttgtcgccgtcgctgctgcaaccaccagcagcggscgcagaactasagacaaatcccccatagccactcagtcttccgtaacccacatcgcagccaaaagatgtcacaactacaccgagtgcctttctttgatcaggargacccggattcctacctggargargargacaacctgcccttcccgtatcccaagtacccacgtcgcggctggggcgggttttatcagagagcgggcctgcctccaatgtggggctgtggggccaccagggtgtatcctggccagtctgccaccaccctctctctacctgtcacctgagctgcgctgcatgcccaagcgtgtagaggccaggtctgagctgaggctctgcccgcctggcgtcntctgactacctctgcctccctcacggtgttggacgaggcctcccatcaacggaccccagctccaagctcagtgctggtcccccattcctcccagccctggcccaaagtccaggctgcggaccctgcccctcccccgaccatgtttgtcccactcagccggaatccagggggcaatgccaactaccaggtgtacgacagcctggagctgaagcggcaggtgcagaagagcagagccaggtccagctcactgccaccggcttccacctccaccttgaggccctytctgcacaggagccagaccgagaaactcaactgaccagcaggcggatgtggggtgtggggcagggcatggagggagaggaataaagagaaacagagtccaggaaaaaaaaaaaaaaaaaaactcga

SEQ ID NO: 42 - DNA, 1536 bp, Homo sapiens
  SITE (687): n equals a,t,g, or c
  SITE (1196): n equals a,t,g, or c
ggcacaggccaacttagtttgagttcttcttctggactctgtatgtccttgtgtgtaccctatgccgttcacagtccgtactctctctgtgarattggctgtctaatccaggtggatcaggaggtgctttgtggtttttttgcaaagaaatgaagtctggcaagcaaacaatgattaaacatgtttcgattcgtgacttgtcttttggcgaaatgcaaaggtgggtgtgcattcttgaattcaaagaaaatctctttcaaatcccctcatcccttgttgctcttctaaatactctctttctagatatcttgcacccccaaaactccctcagcccccatggcagcttttctctctcctctctctctttcccgcctctccctgtctcctcacttcagcctttcctctttcttagatctttattatgtagataaaaacccctccaacctccttagccttctctccattgcatcccctacccgaattatcctcaagaaagaggccaggatccgacacagcgatcagaaatcctcctcccttasaagcscaggggtgagggagttcaggaatattcatacactggtaatccttgtccctgttacagtcacttccttgtatcaggacccttgttactatttacagactattttccatctctcctaatgcaattgctcaaagggcactttaagnataatcattatccattgatgttttttggaggcttttattccctccaataagttctgccgaatactggccgctggctctatttgttaaacaatggagggctttgttccgcttttttttttttttttwttcwtaacctgagctttctgcccacccttagtatggggccaaagggaagatttttatgccaccccttttggtgagaagagtcacttcctgattagtgtttgggctgaaaatgggtccccctttgggaagaaacatgggtgcagtgtacttcctgtgtcacaggattaacagctcctgccccactcccaaggaggcagctcytcggggcagttcytctttgagaatttcatggtcattaagaagcaggytcccagggaccccagagtgggaacctttgactgaagtcaccacagtgggtgtaagataaacataagagacttttctcagggaagatttggaacgaagaaaaagagtaaaaagttcacatggaccatggagtgttntggaaaagggcccagaaagggaagctgtggctaagaagataaactgcctgattgcagagacccaggagaggggatgaaatctctttgtctggtcacatttctcwwtaatgatkytccacatgtacaaagctagccagtttaccaagtgcttccacacacattgcttcattctgtgtctcttaagcagattgactccttggaaaagcctcacgtctggcattctgcacctgcccatcaccagtttggccttggtctgcttggctggttgggtctccccatggtgagctcccatggtatctcctcttcacctttatatcactcattagacaccggtgacaac

SEQ ID NO: 43 - DNA, 2541 bp, Homo sapiens
aattcggcacgaggttcctggccaacctgctgctggaggaggataacaagttttgtgcagattgccagtctaaagggccgcgatgggcctcttggaacattggtgtgttcatctgcattcgatgtgctsgaatccacaggaatctgggggtgcacatatccagggtaaagtcagttaacctcgaccagtggactcaagtacagattcagtgcatgcaagwgatgggaaatggaaaggcaaaccgactttatgaagcctatcttcctgagacctttcggcgacctcagatagacccagctgttgaaggatttattcgagacaawtatgagaagaagaaatacatggaccgaagtctgggacatcaatgcctttaggaaagaaaaagatgacaagtggaaaagagggagcgaaccagttccagaaaaaaaattggaacctgttgtttttgagaaggtgaaaatgccacagaaaaaagaagacccacagctacctcggaaaagctccccgaaatccacagcgcctgtcatggatttgttgggccttgatgctcctgtggcctgctccattgcaaatagtaagaccagcaataccctagagaaggatttagatctgttggcctctgttccatccccttcttcttcgggttccagaaaggttgtaggttccatgccaactgcagggagtgccggctctgttcctgaaaatctgaacctgtttccggagccagggagcaaatcagaagaaataggcaagaaacagctctctaaagactccattctttcactgtatggatcccagacgcytcaaatgcctactcaagcaatgttcatggctcccgctcagatggcatatcccacagcctaccccagcttccccggggttacacctcctaacagcataatggggagcatgatgcctccaccagtaggcatggttgctcagccaggagcttctgggatggttgcccccatggccatgcctgcaggctatatgggtggcatgcaggcatcaatgatgggtgtgccgaatggaatgatgaccacccagcaggctggctacatggcaggcatggcagctatgccccagactgtgtatggggtccagccagctcagcagctgcaatggaaccttactcagatgacccagcagatggctgggatgaacttctatggagccaatggcatgatgaactatggacagtcaatgagtggcggaaatggacaggcagcaaatcagactctcagtcctcagatgtggaaataaaaacaaaacacctgtatggctgccattctcttcagccctcgctctcccctttccacagcctccacccctgacccccatcctcttttcctacctctctgtttggtttagaaattgctcaataagtcatttggggtttggcatcctgcccagccacttcccaaacatgaagacctctctgttgctttatgttgtacatgccccatagccatcccaacgtcctccccagtcctctcctggcaccagcaccttagaagttgttggcagaaggcacttaaactgtgggagaagtgtgcacacctttgagtcccttccctcaaggttaaagctcctgtcagactctcagaagggtctgtgggtgttgtatattaggcaaacaggggaaagcttagaggtccttctatatgtgttaataagctgtttctaagtgtttaaatttgaaaagcatcatgttctcatgatttatgggaatgaagcaagtactgaaatcaaattaaatactccctgggtcctgggtcagtttgaccctagccctggggtgaggcaagccccctcctatgaggatgagcaaaaatactactctcttcgccctgagttgctttctggatctggggcttcaggacttgctgcttcagtcagcctttattagcaccaaagactttatgaagatcccacacacagacacacatcccttcccgcctcccccctgccttcagtaggatctggctccgtggctggaggaccaacccctatagtgggaatgcagagcttaacgtgtactgcttgtgtgtgtgcgtgagtgtgtgtgtgtgtatgagtgtgtgttccgcctcccaccctctccccatctgctctgggtatttttgtttttgtttagttttaggtttacaacagagaggaattaatttatcagcagcctaaaactgttgtgtttttcttatggtttaaaaaacgccatgtcattgataactccctttctcccttcccttctcccggtctgctgatcactctttcatgcctgtgtatccagggtgctctgtttccccaccgttcccaggtgtacgaggcagagggccgggacagctttcctctcagtcattgttcaccccacttgaaaattcagacaagaaaactttgcttaaaagatttcatgtgtgggaaccacagttcctggctgcctttctcctgtgtatgtgtaaattccttaataaatattgcagggaaggacaaaaaaaaaaaaaaaaaaaaaaaaaaaaaaaaaaaaaaaaaaaaaaaactcga

SEQ ID NO: 44 - DNA, 2418 bp, Homo sapiens
  SITE (565): n equals a,t,g, or c
  SITE (1863): n equals a,t,g, or c
cccacgcgtccgcccacgcgtccgcccacgcgtccgcccacgcgtccgggactcagcgaagggtgggcgccgccgaggcctcctgccgctggcgggtttccgcggagtgccgcccggctccgctctgccgccggcgcggctcatgggcagagtcggccgggcgggccggcattaaactgaagaaaagatgtccctgtacgatgacctaggagtggagaccagtgactcaaaaacagaaggctggtccaaaaacttcaaacttctgcagtctcagcttcaggtgaagaaggcagctctcactcaggcaaagagccaaaggacgaaacaaagtacagtcctcgccccagtcattgacctgaagcgaggtggctcctcagatgaccggcaaattgtggacactccaccgcatgtagcagctgggctgaaggatcctgttcccagtgggttttctgcaggggaagttctgattcccttagctgacgaatatgaccctatgtttcctaatgattatgagaaagtagtgaagcgcgcaaagagaggaacgacagagacagcgggagtgganaagacaaaaggaaatagaagaaagggaaaaaaggcgtaaagacagacatgaagcaagtgggtttgcaaggagaccagatccagattctgatgaagatgaagattatgagcgagagaggaggaaaagaagtatgggcggactgccattgccccacccacttctctggtagagaaagacaaagagttaccccgagattttccttatgaagaggactcaagacctcgatcacagtcttccaaagcagccattcctcccccagtgtacgaggaacaagacagaccgagatctccaaccggacctagcaactccttcctcgctaacatggggggcacggtggcgcacaagatcatgcagaagtacggcttccgggagggccagggtctggggaagcatgagcagggcctgagcactgccttgtcagtggagaagaccagcaagcgtggcggcaagatcatcgtgggcgacgccacagagaaaggtgtgtccccagggaagcgtgtgactagagggaaaggactggccccatccatatcagacatggccagtcttgatcctcatgtgtcagcagggggacaatgaggcgtgtggccagagggagagggctggccctgccatcactagaacacaggccgtcctgttcatatgatgcactgccacttccgttttgtgaaaccaggaatcctgaggctcatctttattttttcagaacagacgtagagagatgaaggcttgtggaggaaaagatggtgagagacttgggcagaaaatgagtagtcctcaggaagaaatcttggttatgtgtttagagcatgaaggacagagccatatagtgtggcagtgaatatacctgctatctccatctcagaggtcgtctctacttttcccttttgccctttcagtatagatgtgatttctgattctcttacagattgtttgctttgcgagatctgatgttatgttgcagtctcttggtaaatgatgcctagttggtgttttattttcatttaatttttacagtctgttctgtgttgagggaattcaggaaagagacaaacatatgttagcattttaatcagggaattaagtttgagtcagcctagctgaacttcctttgctaaagaaagaagaaaacttttctggcagccccgttcatgcacagcttagggatacatcacgagcctgacagatgcatccaagaagtcagattcaaatccgctgactgaaatacttaagtgtcctactaaagtggtcttactaaggaacatggttggtgcgggagaggtggatgaagacttggnaagttgaaaccaaggaagaatgtgaaaaatatggcaaagttggaaaatgtgtgatatttgaaattcctggtgcccctgatgatgaagcagtacggatatttttagaatttgagagagttgaatcagcaattaaagcggttgttgacttgaatgggaggtattttggtggacgggtggtaaaagcatgtttctacaatttggacaaattcagggtcttggatttggcagaacaagtttgattttaagaactagagcacgagtcatctccggtgatccttaaatgaactgcaggctgagaaaagaaggaaaaaggtcacagcctccatggctgttgcataccaagactcttggaaggacttctaagatatatgttgattgatcccttttttattttgtggttttttaatatagtataaaaatccttttaaaaaaacaacaatctgtgtgcctctctggttgtttctcttttttattattactcctgagttgatgacattttttgttagatttcatggtaattctcaagtgcttcaatgatgcagcatttcttgcact

SEQ ID NO: 45 - DNA, 1337 bp, Homo sapiens
  SITE (1335): n equals a,t,g, or c
  SITE (1336): n equals a,t,g, or c
  SITE (1337): n equals a,t,g, or c
tcgacccacgcgtccggagcgacctctctgctccgctcgtctcgttggttccggaggtcgctgcggcggtgggaaatgctggcgcgcgcggcgcggggcactggggcccttttgctgaggggctctctactggcttctggccgcgctccgcgccgcgcctcctctggattgccccgaaacaccgtggtactgttcgtgccgcagcaggaggcctgggtggtggagcgaatgggccgattccaccggatcctggagcctggtttgaacatcctcatccctgtgttagaccggatccgatatgtgcagagtctcaaggaaattgtcatcaacgtgcctgagcagtcggctgtgactctcgacaatgtaactctgcaaatcgatggagtcctttacctgcgcatcatggacccttacaaggcaagctacggtgtggaggaccctgagtatgccgtcacccagctagctcaaacaaccatgagatcagagctcggcaaactctctctggacaaagtcttccgggaacgggagtccctgaatgccagcattgtggatgccatcaaccaagctgctgactgctggggtatccgctgcctccgttatgagatcaaggatatccatgtgccaccccgggtgaaagagtctatgcagatgcaggtggaggcagagcggcggaaacgggccacagttctagagtctgaggggacccgagagtcggccatcaatgtggcagaagggaagaaacaggcccagatcctggcctccgaagcagaaaaggctgaacagataaatcaggcagcaggagaggccagtgcagttctggcgaaggccaaggctaaagctgaagctattcgaatcctggctgcagctctgacacaacataatggagatgcagcagcttcactgactgtggccgagcagtatgtcagcgcgttctccaaactggccaaggactccaacactatcctactgccctccaaccctggcgatgtcaccagcatggtggctcaggccatgggtgtatatggagccctcaccaaagccccagtgccagggactccagactcactctccagtgggagcagcagagatgtccagggtacagatgcaagtcttgatgaggaacttgatcgagtcaagatgagttagtggagctgggcttggccagggagtctggggacaaggaagcagattttcctgattctggctctagcttccctgccaagattttggtttttatttttttatttgaactttagtcgtgtaataaactcaccagtggcaaaccaaaaaaaaaaaaaaaaaaaaaaaaaaaaaaaaaaaaaaaaaaaaaaaaannn

SEQ ID NO: 46 - DNA, 1276 bp, Homo sapiens
  SITE (20): n equals a,t,g, or c
  SITE (70): n equals a,t,g, or c
  SITE (81): n equals a,t,g, or c
ctcacgcgtccgggacggcnggacgcgtgggtgcatttgctgagtgttttacttccaattatgtgattcnatattacaggngctgccatgtggtaatgagaagaatgtatattctgttgttttggggtggartgttccatagatgtctatcargtctgtttgatccagarctgarttcargtcctggtatctcartctttactgtgartcttcaaatgacataagaatgacagaamttgtagttaaggacaacagrgcawtscaaggcagcagcatagtccaaaatagacgtgtcttcttcccgaagtcactgtagtgggggacataaaatttaaggaacctctgggtcttactacctgatgtggccaattggactaaaaccaataaccattaaggaawaaatssactwaaccacaagcaactcaattaamaaataggcaaagaacttgaagaggcattttcccaaagaagccaacaagcatgtgaaaagatgctcaacatcattagacatcagggaaatacagatcaaaatcaaaatgagataccagtttatactaaggtggctataataaacatcataataatgaaggacattaacatgtattagtgaggatgtggagaaatggaacccatttctggtaggaatgtaaaatagtgcagccactgtggaaaacagtttggtggttccccagaaagctaagcatagagttaccagagaacctagcaatttaacttataggtacatacttcaaaggaattgaaaacatagatyctaacagatactkgtacagcaatatycatkgtggcwttattcacgatagccaaaaggtaaaacaactcaagtgtccatcaaaatataaatgtgtaaacaatgtggtatattcctagaggggaatattattcagctttaaaaaggaatgaagtactggtacatgctacaaaggtggatgagcctcagaaacatgctgagtgaaagaagccaatgataaaagaccatatattgtatgattccattatatgaaatktccagracattcaagtctatagagacagaaagtagattagtgaytgcttagggctggcagggataaggggktcatggctaaagggtatgggtttttgtttgtggaggtgaaaaattttaaaacttgkgstgatggttgcacaagcctgtgaagatactgaaaaccattgaattgtgtgctttaaatggatgaattgtatggtgtttgaactatatcccaataaagctgttttttaaaaaagaaaaaaaaaa

SEQ ID NO: 47 - DNA, 1282 bp, Homo sapiens
  SITE (115): n equals a,t,g, or c
  SITE (433): n equals a,t,g, or c
  SITE (1021): n equals a,t,g, or c
  SITE (1030): n equals a,t,g, or c
  SITE (1042): n equals a,t,g, or c
  SITE (1046): n equals a,t,g, or c
  SITE (1056): n equals a,t,g, or c
  SITE (1066): n equals a,t,g, or c
  SITE (1069): n equals a,t,g, or c
  SITE (1104): n equals a,t,g, or c
  SITE (1110): n equals a,t,g, or c
  SITE (1112): n equals a,t,g, or c
  SITE (1125): n equals a,t,g, or c
  SITE (1130): n equals a,t,g, or c
  SITE (1133): n equals a,t,g, or c
  SITE (1191): n equals a,t,g, or c
  SITE (1228): n equals a,t,g, or c
  SITE (1231): n equals a,t,g, or c
  SITE (1244): n equals a,t,g, or c
  SITE (1245): n equals a,t,g, or c
  SITE (1255): n equals a,t,g, or c
  SITE (1281): n equals a,t,g, or c
ggcacgagagaaaggccagtttgtggggcaaattagactaaactctgtgctggtagaactgctttccaagaatgctgtcactgctatagtttttaatgcttcaaatctcaactcnctccctccattcgccatagctcaaccatgttccaggagtgtattccaatcagcttgttttytcttaactggtcaaaggaatgttgctcattcacctgccccaactcacatattaacaattgtttaactgggattagataaaaggaaagctgacttacagatgaaccaagagggagctatttatgccacagcccccagcccagtaactttatgtttctgatctcctgcaaaatttttttataaaaaaagcttagccaggaactagtagaaagaataaagtaaagatggtgtaagaaatatatggataggcaagttccwnygytgagaccttaygaagaatggtgaggtgtggttaaatggaggagataatcagcagataawagctcagatggtcmsaaacatwtagaactataatgccatctccaaagtattgcatgcatacaaatgacgttcaatccgttgaatataatggagacacactatttcaaaaattaagttcttctwtcttgagctttaaaagtatacacatttacccmaatgaattwaaaacatgcmcacmaatatttatatcaaaagtgtacatgatttccaaaacttggaagtwaccaagatttacttccwtgggttagtgcataaattaactgtgatacatatatactatggaatwttaytcagcaacagaaataaatgaghtatcaaaccacagaaagacatggaggaaacttaaatccaggtggmtaagtgawagaagccaatatgaaaaggctacattstatatgatttcaaatatatgacattcaggaaaaggcaaggctgcagagacagtaaaragatcagctaggtgcatgkggstcacgccactttgggaggcttgaggcaggkggattatmttgaagtcaggagttcnagaccagcntgggcaacatgntganaccccatatntcctaaaagnacnaaaatttaactgggcgtggtggcacgtgcctgtantcccancnactctggtggctnagacnggngaattgcttgaacccaggaggcagaggttgcggtgagccaatgattgcaccactgcantccagcctgggtggtagagcgagactcagtctcaacnttnatcaagatagganngaaatagaanggaagaaagagaaaaaataaaaatana

SEQ ID NO: 48 - DNA, 645 bp, Homo sapiens
aaggtagaaaagtacagaaaacactaaattttcattgtgctgtttcaatgtggcagattctttaaaatacttcgacacgctacaataattaaaggttttaagaacattaagatacttaaaaaataaaagcccacaattgaataacaaaaatgaactttgttttattttttattggcattaatgtaggttgccgtggtgaaaatagtttgaaatacttcacagtaacagttttgtgcagccctagagattaaaaacagcaaagtaaataagcaggactctcaacgactcatactcacagacatgtttaatgtaatcctagcacttcgggaggctgaggcgggaggattacttgagcctaggagtttgagaccagcctgggcaacatagcaagatcccatctctacaaaaaagtgaaaaagttagctgaacaaggcggcatgcacatgctactccagacgctgaagtgggaagatcacttaagtccgagagatcgaggcttcagtgagatatggctgagacactgctctcagcctggatgacagagtgagaacctgtctcaaacaagagaaaaaaataaatcaaatgctattcaaaattctaaaaaaaaaaaaaaaaaaaaaaaaaaaaaaaaaaaaaaaaaaaaaa

SEQ ID NO: 49 - DNA, 1495 bp, Homo sapiens
  SITE (723): n equals a,t,g, or c
  SITE (872): n equals a,t,g, or c
  SITE (994): n equals a,t,g, or c
  SITE (1008): n equals a,t,g, or c
  SITE (1078): n equals a,t,g, or c
  SITE (1106): n equals a,t,g, or c
  SITE (1107): n equals a,t,g, or c
  SITE (1112): n equals a,t,g, or c
  SITE (1115): n equals a,t,g, or c
  SITE (1121): n equals a,t,g, or c
  SITE (1123): n equals a,t,g, or c
  SITE (1228): n equals a,t,g, or c
  SITE (1285): n equals a,t,g, or c
  SITE (1369): n equals a,t,g, or c
  SITE (1451): n equals a,t,g, or c
  SITE (1467): n equals a,t,g, or c
tgtggaaaacagtaggaaagcaatgaaagaagctggtaagggaggcgtcgctgattccagagagctaaagccgatggtaggtggagatgaggaggtggccgccctccaagaatttcactttcacttcctctctctctctgtcttcactgactgcacttcttcaggagaagcttttgttatctgtatcacgcagacatgctgctctttctgtttgtgtgcttacccatcacttggatggcagaattcttgtcacaactgagaccaccttctataaaagtaagctgaaaggaacagcatcctcgtcagtgctcggcaggggcgggtaggggatgatggttttttccctaaggtaaaactgctgttgctcttgtttcctttttaactgtcagtgtttggctttcatcagamtgaacattttggtgttccacttgaactgacggtttgatttttatcattttggaaaggtgatcatagcaattcctttccaacttgctaaaattccatactccccccttttaaaarwatkgttstgcttmcattgctktmcwtttsccttgkctsmctttttcytcctgtkgsctgaarttktwcyttcyttktttcttaagstwtttttcagtagcaaacaaggctgttttcatcaatacccacattcccaytcrgkrrgrmmatytagtyttytcccagkttaaktgkgrgrkggrkgaaaatratktckggkangkggawatkawawakgkkwwatgkaaacacaaatatatytytytamattccactttaattkgggaaaaaaggcagctkaagtggagtgtwaagrarracctkgrrstgcttttcaacatgggatatggtcactatrgcatrggaaacangatgccttctatcawakatgggtctaattactycctaatttaaaacacgtatttttttaaatagcatgtttattttcaaatatdatataatggtcgsgcrtccttaaataattttaaacaangtgtccccgrgacngcatataatgttcaaawgtkagaggtaaggacttycctttctgtctycttaacacttwagtaaatrattngawttawagcaagtttgtccaactkgcnncctgnggnccgcananggmwgrggaagggcttttcmaacacaaattcgtaaactttattaaaacatgagattttttgcctttttttttttaagcccatcagctatccttaatgtattttanatgtggcccaagacaattcttcttccaggatggcctggggaagccaaaagattgganacccctgatttgtaggttttcaactttaaaatatatgctataaaataagttcatttaagtaggctaggcatggtggctcatgtntgtaatcctagcacttagggggcccgaggcagaaagattrmctgagctcagcagtttgagaccagcctgggccaaacggtgnaaccctgtttttactnaaatacccaaaaaaaaaaaaaaaaaaaa

SEQ ID NO: 50 - DNA, 1630 bp, Homo sapiens
  SITE (527): n equals a,t,g, or c
  SITE (546): n equals a,t,g, or c
gaattcggcacgagattatctgtcttcttcttaccaatttatagaactttttagtattgcagataaagttcctcatcggatatcttctctccttctattgggtacctttttattgtcttaatgggggtcttttaatgaccagaagttcttagttttaaaatagtccagtttatccatttttaaattgttagtgctatttgtgtcctgcttgagagatttttgcctactgcaaggtcacaaagatgttttcctctaaaagccttttggttttgcccttttgttttagatctgcagctcatctggaattgagtgtgtggtgtgtgtgtggtgtgaggtaggggtcctttttttcatatggatatccaattgacccagaacagtgtattgaaaaaaaaaatctgtcttagtcaatttggactgccgtaacaaaataccataacctgggtggcttagactacagaaatgtagcgctcacagytctggaggctggaaggccaggatcaagacaccagcagattcggtgtctngtgaggacccactttgtgnttcatagatgtcaccttcttgctgtgtcccagtggtgraaggggcaaactagctcccttaaacctctttttataagatccctaaaacctttaatgagggctccaccctaatgatctaatcacctctcaataccttatcttgggggttaagatttgaacagaggaatttgggggagacatagacatttggagcatagcatcttcttttcctcagtgcacagcagtgctgccttcatcatcagtcaggtgtctgtaggtgtgtggctatttctggacttggcactctgtcctacttgttgatttctctgccttataccaatgccacaccatcttaattattgtaaccatcttaattatttataaaaagtcttttttttttttttgatacagtctcactctgtcccccaggctggagtgcagaggtacagtattggctcactgcaacctctgtccccaggcttaagcaattctcatgcctcagcctcctgagtagctgggattacatgtgcaccaccacacttggccttctttcttttctttccaayccattkgttttttatttctttccctkgctttatkgcactggctaagatttccagtgctgaataggagtgatgacagtgggcacccttgtctttctcccaacctcagagggaaaagtatccaatgcatttgtagatattctttatcagattagcttcctttctagcggcttgtgtctttgcattgtttttcatgagcaagtgttgaactttttcactgagttttccaaatactttttccattgagtttttttactttaaccgtcatattgccaaaagtctgcatttgttatttcctcccaaattgctgggattataggcattagccactgcacccagccagactttatagaaaatcttgatatctggtcatggaagtcccctagcttggttatttttttttggtaccgctttgtctattttcggccctttccatttccatgtaacttttaggatcagcttgtcagttcctaccaaaaaaaaaaaaaaaaaaactcgaggggggcccggtacccaaatcgccgggtagtgatcgtaacaatc

SEQ ID NO: 51 - DNA, 2420 bp, Homo sapiens
  SITE (1654): n equals a,t,g, or c
gccaacagtgctccctcatagatggacgaagtgtgaccccccttcaggcttcagggggactggtcctcctggagggagatgctcgccttggggaataatcactttattggttttgtgaatgattctgtgactaagtctattgtggctttgcgcttaactctggtggtgaaggtcagcacgwggccgggggagagtcacgcaaatgacttggagtgttcaggaaaaggaaaatgcaccacgaagccgtcagaggcaactttttcctgtacctgtgaggagcagtacgtgggtactttctgtgaagaatacgatgcttgccagaggaaaccttgccaaaacaacgcgagctgtattgatgcaaatgaaaagcaagatgggagcaatttcacctgtgtttgccttcctggttatactggagagctttgccagtccaagattgattactgcatcctagacccatgcagaaatggagcaacatgcatttccagtctcagtggattcacctgccagtgtccagaaggatacttcggatctgcttgtgaagaaaaggtggacccctgcgcctcgtctccgtgccagaacaacggcacctgctatgtggacggggtacactttacctgcaactgcagcccgggcttcacagggccgacctgtgcccagcttattgacttctgtgccctcagcccctgtgctcatggcacgtgccgcagcgtgggcaccagctacaaatgcctctgtgatccaggttaccatggcctctactgtgaggaggaatataatgagtgcctctccgctccatgcctgaatgcagccacctgcagggacctcgttaatggctatgagtgtgtgtgcctggcagaatacaaaggaacacactgtgaattgtacaaggatccctgcgctaacgtcagctgtctgaacggagccacctgtgacagcgacggcctgaatggcacgtgcatctgtgcacccgggtttacaggtgaagagtgcgacattgacataaatgaatgtgacagtaacccctgccaccatggtgggagctgcctggaccagcccaatggttataactsccactgcccgcatggttgggtgggagcaaactgtgagatccacctccaatggaagtccgggcacatggcggagagcctcaccaacatgccacggcactccctctacatcatcattggagccctctgcgtggccttcatccttatgctgatcatcctgatcgtggggatttgccgcatcagccgcattgaataccagggttcttccaggccagcctatraggagttctacaactgccgcagcatcgacagcgagttcagcaatgccattgcatccatccggcatgccaggtttggaaagaaatcccggcctgcaatgtatgatgtgagccccatcgcctatgaagattacagtcctgatgacaaacccttggtcacactgattaaaactaaagatttgtaatctttttttggattatttttcaaaaagatgagatactacactcatttaaatatttttaagaaawtaaaaagcttaagaaatttaaaatgctagctgctcaagagttttcagtagaatatttaagaactaattttctgcagcttttagtttggaaaaaatattttaaaaacaaaatttgtgnaacctatagacgatgttttaatgtaccttcagctctctaaactgtgtgcttctactagtgtgtgctcttttcactgtagacactatcacgagacccagattaatttctgtggttgttacagaataagtctaatcaaggagaagtttctgtttgacgtttgagtgccggctttctgagtagagttaggaaaaccacgtaacgtagcatatgatgtataatagagtatacccgttacttaaaaagaagtctgaaatgttcgttttgtggaaaagaaactagttaaatttactattcctaacccgaatgaaattagcctttgccttattctgtgcatgggtaagtaacttatttctgcactgttttgttgaactttgtggaaacattctttcgagtttgtttttgtcattttcgtaacagtcgtcgaactaggcctcaaaaacatacgtaacgaaaaggcctagcgaggcaaattctgattgatttgaatctatatttttctttaaaaagtcaagggttctatattgtragtaaattaaatttacatttgagttgtttgttgctaagaggtagtaaatgtaagagagtactggttccttcagtagtgagtatttctcatagtgcagctttatttatctccaggatgtttttgtggctgtatttgattgatatgtgcttcttctgattcttgctaatttccaaccatattgaataaatgtgatcaagtcaaaaaaaaaaaaaaaaaaaaaaactcgagggggggtcccgt

SEQ ID NO: 52 - DNA, 1172 bp, Homo sapiens
aaaattattctgtaccatcacagcttttcacaacgatggcaagccttatgtcttgggagcctgttttgctaggcaaagttacaagtgacctaatgggagctcaaatgtgtgtgtgtctctctgtgtgtttgtgtgtgtgtgtgcactcaagacctctaacagcctcgaagcctggggtggcatcccggccttgccattagcatgcctcatgcatcatcagatgacaaggacaaccctcatgacgaagcaacatgaattagggggcctcttggccttggtccaaaattgtcaatcagaaatgaacataaaggactccagagcagtgggactgtctgtcaaaagactctgtatatcttttgtggatgagttttgtgagagaacagagagaccattgtacctggcacaagggctsttcatgaaaagggagacttactgggaggtgcaagacagtggcatttctcctctcctcttgctgctcagcacagccctggattgcagccccgaggctgagaccagacaaagcccgggaggcagaaagatgctccaagaaccaacactatcaatgtctttgcaaatcctcacaggattcctgtgggtccagctttggaactgggaaacctttcttcggatccgcactcattccactgatgccagctgcccctgaaggatgccagtactgtggtgtgtgagtctcagcagccgcccacacgctcctaactctgctgcatggcagatgcctaggtggaaatagcaaaaacaaggcccaggctggggccagggccagaggggaaggccctggattctcactcatgtgagatcttgaatctctttctttgttctgtttgtttagttagtatcatctggtaaaatagttaaaaaacaacaaaaaactctgtatctgtttctagcatgtgctgcattgactctattaatcacatttcaaattcaccctacattcctctcctcttcactagcctctctgaaggtgtcctggccagccctggagaagcactggtgtctgcagcacccctcagttcctgtgcctcagcccacaggccactgtgataatggtctgtttagcacttctgtatttattgtaagaatgattataatgaagatacacactrtaactacaagaaattataaatgtttttcacatcaaaaaaaaaaaa

SEQ ID NO: 53 - DNA, 1589 bp, Homo sapiens
  SITE (1550): n equals a,t,g, or c
  SITE (1578): n equals a,t,g, or c
cccacgcgtccgcccacgcgtccgcccacgcgtccgtttcaaagggagcgcacttccgctgccctttctttcgccagccttacgggcccgaaccctcgtgtgaagggtgcagtacctaagccggagcggggtagaggcgggccggcacccccttctgacctccagtgccgccggcctcaagatcagacatggcccagaacttgaaggacttggcgggacggctgcccgccgggccccggggcatgggcacggccctgaagctgttgctgggggccggcgccgtggcctacggtgtgcgcgaatctgtgttcaccgtggaaggcgggcacagagccatcttcttcaatcggatcggtggagtgcagcaggacactatcctggccgagggccttcacttcaggatcccttggttccagtaccccattatctatgacattcgggccagacctcgaaaaatctcctcccctacaggctccaaagacctacagatggtgaatatctccctgcgagtgttgtctcgacccaatgctcaggagcttcctagcatgtaccagcgcctagggctggactacgaggaacgagtgttgccgtccattgtcaacgaggtgctcaagagtgtggtggccaagttcaatgcctcacagctgatcacccagcgggcccaggtatccctgttgatccgccgggagctgacagagagggccaaggacttcagcctcatcctggatgatgtggccatcacagagctgagctttagccgagagtacacagctgctgtagaagccaaacaagtggcccagcaggaggcccagcgggccmaattcttggtagaaaaagcaaagcaggaacagcggcagaaaattgtgcaggccgagggtgaggccgaggctgccaagatgcttggagaagcactgagcaagaaccctggctacatcaaacttcgcaagattcgagcagcccagaatatctccaagacgatcgccacatcacagaatcgtatctatctcacagctgacaaccttgtgctgaacctacaggatgaaagtttcaccaggggaagtgacagcctcatcaagggtaagaaatgagcctagtcaccaagaactccacccccagaggaagtggatctgcttctccagtttttgaggagccagccaggggtccagcacagccctaccccgccccagtatcatgcgatggtcccccacaccggttccctgaacccctcttggattaaggaagactgaagactagccccttttctggggaattactttcctcctccctgtgttaactggggctgttggggacagtgcgtgatttctcagtgatttcctacagtgttgttccctccctcaaggctgggaggagataaacaccaacccaggaattctcaataaatttttattacttaacctgaagtcaaggcttcacgtgttcatgaactgggtaactggcagcaagcatgcgcacgttcacatgtgcgctcctgggtctgtctttgtgtgtgccagcagggggcgcaaaagaatctggctggggcggctaangggaagcaaggcctgggctccgaaacangacccaactgg

SEQ ID NO: 54 - DNA, 2074 bp, Homo sapiens
  SITE (848): n equals a,t,g, or c
  SITE (2073): n equals a,t,g, or c
ccgcctgaccgccccgggcttaagggagcctggctaggccggcagccggatggtcccgcagctcggggccggccatgcttcgcggtccgtggcgccagctttggctctttytcctgctgctgctcccgggcgcgcctgagccccgcggcgcctccaggccgtgggagggaaccgacgagccgggctcggcctgggcctggccgggcttccagcgcctgcaggagcagctcagggcggcgggtgccctctccaagcggtactggacgctcttcagctgccaggtgtggcccgacgactgtgacgaggacgaggargcagccacggggcccctgggctggcgccttcctctgttgggccagcggtacctggacctcctgaccacgtggtactgcagcttcaaagactgctgccctagaggggattgcagaatctccaacaactttacaggcttagagtgggacctgaatgtgcggctgcatggccagcatttggtccagcagctggtcctaagaacagtgaggggctacttagagacgccccagccagaaaaggcccttgctctgtcgttccacggctggtctggcacaggcaagaacttcgtggcacggatgctggtggagaacctgtatcgggacgggctgatgagtgactgtgtcaggatgttcatcgccacgttccactttcctcaccccaaatatgtggacctgtacaaggagcagctgatgagccagatccgggagacgcagcagctctgccaccagaccctgttcatcttcgatgaagcggagaagctgcacccagggctgctggaggtccttgggccacacttagaacgccgggcccctganggccacagggctgagtctccatggactatctttctgtttctcagtaatctcaggggcgatataatcaatgaggtggtcctaaagttgctcaaggctggatggtcccgggaagaaattacgatggaacacctggagccccacctccaggcggagattgtggagaccatagacaatggctttggccacagccgtcttgtgaaggaaaacctgattgactacttcatccccttcctgcctttggagtaccgtcacgtgaggctgtgtgcacgggatgccttcctgagccaggagctcctgtataaagaagagacactggatgaaatagcccagatgatggtgtatgtccccaaggaggaacaactcttttcttcccagggctgcaagtctatttcccagaggattaactacttcctgtcatgaaggctagaggaagacttcctggaactgcctttcttccactaacaggaccctgggacctgtaggagcaccccgtttgggactgtgaggtgtttgagggtgtggactggcatccagcagccactaacaaacacacaactggtgtgtaaaaggcaggccttacattagaagccaagccaatcctttttcttttttttggaggtcccaccgagatagataggaacttggattgctgaattcaaaaacagagcccattcttaagatcacttggtgccttaaagacacgcattccaaagtggaatgtggttgaagaaagtgggccaggtggttgaagaaagccatgtgggagctcagcaaatcccaagggcttattatgacactccagatggtctccttagcatctcagctcttctgcaaggaagagcttgggtgttaggcctcagaggctgtagggtccttgggttacagagccggggagaacgaagttctgtgacccaggggtggagaatacactctaggtttgcgggctggtgggctttcaaattggtacttccagaggaaagccaagctgcttctgttgtgagcgaatcagccaagagcctgaggctgaagggaaaagtacacagaggaagatattttacaaaccaggtcagtgtaggccaagacttatggtctacagattttggcgggggaggggggaccttttcaaagacaatagggggtcttgacatgtttgttgtatgtaaagatgataagattaaaatttttgattttcctaaaaaaaaaaaaaaaaaaaaaaaaaaaattnc

SEQ ID NO: 55 - DNA, 1483 bp, Homo sapiens
  SITE (945): n equals a,t,g, or c
gaattcgscacgmgcgtggaggcgccacgtcccttgcggcggcgggagagaaatcgcttggacttcggggcggcctcggacggccatggcctttaccctgtactcactgctgcaggcasccctgctctgcgtcaacgccatcgcagtgctgcacgaggagcgattcctcaagaacattggctggggaacagaccagggaattggtggatttggagaagagccgggaattaaatcacagctaatgaaccttattcgatctgtaagaaccgtgatgagagtgccattgataatagtaaactcaattgcaattgtgttacttttattatttggatgaatatcagtggagaaaatggagactcagaagaggacatgccagtagaagttattactttggtcattattggaatatttatatcttagctggctgaccttgcacttgtcaaaaatgtaaagctgaaaataaaaccagggtttctatttatctgtttttttttttaatgttgcacttgtagtttcattacaaaagatcagatcatgaaaggcagtaactctccaggactggaatatctgattgctcagtgttaatagtagttcatgctgtggtgagattgttaaaagggtgcaagactgttgcttctctttttttagatatttttctatctctcacttctcagggatgaaattctttttcaaagttttgaagttccttgcaacttagccatgatgtgagtggttatccctagataaaattaaaaggatttttaaaaagtaattactgcacataaaatgataaataggtaatttgaataattttattttaagctccttggttaattattttgtctattgtctcagctataaattcaaatttatacatactattgagtattaatattctctgatttcagggagaattctgtcagtcacatgatgattatgtttttntttaacattctttccatgcacttgttattttattaatttgcctgaatgatgagaccagaccagtgtctacagattttcattgtcagaaaaatctataagtctgccctttttacaatgatggatttaaaaaaaacaacagcgtaaatattagcccacaagagcagtcctaaacaatcacaattacactgtactacccaagaagactgtttattgtgaagcatttacctttcaaaaaatcattacatttctatttcttggtggagcagcacattgtggagtgtgattcttaattcttcattgagtttgtcaataggacattgatgctggataggttgtcttttgtttttatgtctcagaccatcttgtgagattgtttgcctatctcataatacagttttatgcagaaaggttgaaactatgtaaatggtttttatggaaattatcagttacaatattttaaaggtgtagaatggcatctttgtttataggagaacatttgtaaataaagttaaatttctaagtcaaaaaaaaaaaaaaa

SEQ ID NO: 56 - DNA, 1123 bp, Homo sapiens
  SITE (213): n equals a,t,g, or c
caaaaataataatagtcatcacatttgtatagcactgggtcatttttcccaagaccatttagttacttgacctcagctgttgtccagcttccagtcttggggtaatggcagcttaataatctgaaaattgccaagagaaagatgtggaaggatgaaatggaggcaacatgaatttctgtcaccttgtcatatgttctcatttccakgccttgngagcaagagagttaggtatatcttctgtaactcagacaattttcttcctctttgcagaatggcccctaggaatcaaggtagcttttcttttggaaacttcatgctgtttttagtgttgatagaaaggaggtatctgccatttctgtcacctattttattttgttgtagcacccataatagatcagctgtcacagccacaaatctctgaggagactggaatcattcccagataaatcagaaagtcagaatcactttatggttatagtcctggcttcttgagagcttgtctggaggttgtagcaggggagcacagctagtcatataccctwgactarsgaccggtctwcctctattggggatggttgtcctcttctactgagcttgcagctttgggagggacgcacatggagtggtgagggaggaaggggacacccgcctagccagccagatcagctgaatcaaccctggcaatcaatggggtgacagatgttgcagccagatcgccctcacatccagtcctaccttcttggtaacaaaacaattggttttgctggtctagaaactgtagggctagacatgtattataggactggcttagggagagttactttatattagcactcatgttttcactcatttatttcttgtagctcattaaaagaaaaaccataattgagcatctactatatgccatgcattgtgctgagtatccatgatgctcaggtgaacgggacatggtcctgtaaaaagtgtaaagtctgctgggaaagttagtgctcaaaagtgtaactaaatacttgaggcaagtgctttactagggaataaactaaatatcaagagaacaaagataagcaattccttcacgatgttttacatggtaaatccatacaattttaaaaaaaaaaaaaaa

SEQ ID NO: 57 - DNA, 1239 bp, Homo sapiens
  SITE (405): n equals a,t,g, or c
  SITE (473): n equals a,t,g, or c
  SITE (1223): n equals a,t,g, or c
  SITE (1224): n equals a,t,g, or c
gtattgatacgaattttgactacatttctgatggtgtgttttgctggttttaacttaaaagaaaagatatttatttcttttgcatggcttccaaaggccacagttcaggctgcaataggatctgtggctttggacacagcaaggtsacatggagagaaacaattagaagactatggaatggatgtgttgacagtggcatttttgtccatcctcatcacagccccaattggaagtctgcttattggtttactgggccccaggcttctgcagaaagttgaacatcaaaataaagatgaagaagttcaaggagagacttctgtgcaagtttagaggtgaaaagagagagtgctgaacataatgtttagaaagctgctacttttttcaagatgcatattgaaatatgtnawgtttaagcttaaaatgtaatagaaccaaaagtgtagctgtttctttaaacagcatttttagccctngctctttccatgtgggtggtaatgatctatatcaccaacctkaatctctctgccttttttttcaaacaccccttcatcatccatcttaatttgcataaggacatatctactttaatgtactaccacagtttacagttaatgtgggaaagaccagcttcagtatcctcttcagctaggattgccctaacttttaactttcacagtttcctgattcatatttgcccaggctctgatgccttgaattggttttggctctcttttttggatctgtttttgttgttaaacatcataatgcagtctctcattaatttttaccatcatttaccctgataatctgcctcttctccatttctccttcccttactacctttctttgaattactgtaactgattggtcccaccaaaattttaaagtacatgaagtatcttcattggttcatcctcttgccccctccagatgtcaaaaaactttatcctgccccctagctgaccacccaggttcctttatttcagtggcccatgtgagtctaccttcccctaaggagtgccctaatccagccctttttttgtttcttatgacccatatctttaggctcttcccatttctaggtgggagataggtaagtttcaaatctatgccagtcttatgaatattacattagggtaatgtgctataatgaagaaataaaaaatacagtgcttaaaagaaaataaaattctatttctgtctaaaaaaaaaaaaaaaaaccnnggggggggccccggt

SEQ ID NO: 58 - DNA, 803 bp, Homo sapiens
ggcagaggtcaatccaggactacaaacacctgtgccaagacctgagcttctgccaggacctgtcatcctccctccattcggacagctcctacccaccggatgcgggcctgtytgacgacgaggagcctcccgatgccagcctgcctcctgacccgccaccccttactgtgccccagacgcacaatgcccgtgaccagtggctgcaggatgccttccacatcagcctctgaagggctggggggcagggggcatgcacccatgcaaaaggctcagaaactccccctccggcaagccctcagacttcggagcctgcgccttcccccctaccgcctcacctcacaggagggccaggcatgtattcctcagaggcgaaactgccaaactctttctcctgtcttgggttggctggcactggggcgggcatctagggtacagcctctgctcatggcactgggcctccagttcttccacatgtgtgcacccccagcttggccaaccctcagccttgcggtggggcccgaagcatcttcccttccgcttggcgtctctgggattgggatgagtgcctggctcccatctcctcctcaccttttgttgctatcggcagctgctggctcaggggcatcccamctccgggctctgggttcctctgccctggaagggctccaggacccgtcccaataaccacccacggccagkargccaaggccccgtgctggatatttaaatttaggggccggtctccagggcgcgtagataaataaatacactcagcgtcaaaaaaaaaaaaaraaaaaaaaatt

SEQ ID NO: 59 - DNA, 995 bp, Homo sapiens
  SITE (7): n equals a,t,g, or c
  SITE (16): n equals a,t,g, or c
gatttcngcacgaggnaacagctttattcttggttattcctaatgtccacctagtcctctttwactttycttggtagggttagggtggcatggggaaatgggacggtatcattttgtctttttaactttttttttttccacctacagcagctgtttttaccctgtggtcagtcaggtactatatttagtttgcagttgcactgctgatcgacccttgatggccccagttggaagttgtttggggggaaggaaytaggagaggccaggscctccatttaaaccatgtctgtaatgtctccttggaaagaaaaaaagatactgttccagtcatggtttcctggtagttgacgtttaaaatgggcctcatttaaaaatttcaataattcaggctaattttttccctttatatggtaactccaccaagtttgtctaaatgtatgatttttatcatgattaagtttttayttccacatcatgtgacaactggcctgggatgggatataagctcagaacacaaagtcattcacctcttaaaaaaataattctatctgtggcgggttatgttatttttgttcaaagaggacacaatatgatgcagaatacaccattgaaggattttttggtttggcaagttcttatttttttaaatggctgtaaaacctagcagtgtttctgaaattgcataccttacctgatgttcagagatccgatttacttcttgatttcccagcaagtgattttgaaaacatttaatctaatcattccccccaccgtctgttcaaatcaaaggaagtggcatccagcactaattttcatgcatttatgaaaggatgcctgaggacccttaagtataattcaaaattttgtttaatgtgtgttccttgatgaagttctttaggagtcgtagaacgaactgattgcccactgatcatcaaatgcaagttatgaacatttaataaaaatttaaaaccaaaaaaaaaaaaaaaaaaactcga

SEQ ID NO: 60 - DNA, 966 bp, Homo sapiens
gacagtacggtccgaattcccgggtcgacccacgcgtccgggagaggacatgcagtgggcacagaaagttcaatggaacagatgccactgtgggcaccaagactgtaatgactctgtgtggtaggtagttttaaaggactgcatgccttggaaatgattcttcacttggagaacatacttgcctctagatatgtttgtcactctaagcatcctgaatataacaatagagaaagataagtcaaccaacagatttagggatgtgtttcttcagcacattttggtcattttgatgccaagtttgacatactgtttaattgggcagcacctttgctcctttaccaggtatgtatcactttgttactccaggtgccattcttggtgatgacagaatgtttatcactatcgttgttagcaagaggaagctttcaatataggaacttaacatcttcccatgagtataaatgaatttaagacatttgaatcaaaacttcagtagagggaggttttagaattcataaaactggtttaaggaaattctttttacttttcccaaggttaatctttttaaatatctctagacatcaaatactttctgtatgtattagctgtgtctgtctatgatgcaagtaactctcctcctatttgggggatagttcagagaggtaggagcattatctcccatttttctggtgacttcttggagtatagaattcaccattttatccgtaagtcttcaaaggattatggtggactagaacttacatagtgcaaaatagtcttctatttttaataggaacttagaaaaaacttagaattatatatagagttgtttcctttagaaaccagagctatttatttgtatttaaagcactgtttattatttgtactgattcttatccctctgtgtgaataaatgtaagacggtgaaaaaaaaaaaaaaaaaaaaaaaaaaaaaaaaaaactcga

SEQ ID NO: 61 - DNA, 262 bp, Homo sapiens
  SITE (256): n equals a,t,g, or c
  SITE (262): n equals a,t,g, or c
ttgcaggtatacatccagatgcacagaatgtccatttgtcccttattggtgatgctaattttgatcacttgggtaagatgtccagtttctccagtgtatcgttattgtttttccttttgcaattagtgggtaatttgtgaggagaaactttgagaccttgtttgacaattctgttcctccatcaaatctacccctccctaggtttagcatcctttgacaatccttgttctgaataaatttttaactaagatgtttncccaan

SEQ ID NO: 62 - DNA, 753 bp, Homo sapiens
  SITE (337): n equals a,t,g, or c
  SITE (649): n equals a,t,g, or c
  SITE (720): n equals a,t,g, or c
  SITE (750): n equals a,t,g, or c
ggcacaggttcttttgccagtcatgacagaaccatgcaagatattgtttacaaattggtaccaggcctccaagaaggtgagtgtctgactgtcttgctgatccctgaggtcccagcctggcctctgcagcccctgctctcctggaagtttggttctcggatgggaggcccctttccttttggccgaatcaccgtcttctcatccctgctctcagcccaacttcatctccttggctggtctcttctttcgtctaagatgcgtakacatctttttaccccttatgtgtattcattcagcaagtatggatcgcatgtttagcacatgggamccccagggntcaacgcagctcctgcccctcccaggaccctgccttsttcctgggccccacctcctgtcccaggcctgcctcccctcatcccacagcgccagcttccccacaacagaggagcagcacgttggcatagcgggtagctggtgtttctagaaaaacttcaccataaagtcaaatttcatttagaattaaaagaaataccaagtagtacaaataccctgaaagtggaaatcggttgcttggggatcgctcagctgaaagctcccccagctcccgacactctcacggtggttggccctccgctggcgaaccggcaangaagcccaaggaagggggccaggttcagcgcccaggttgggcttgtccctggttattcctgctccatccanaacctttccaaaaggcagaatagaaaaacntga

SEQ ID NO: 63 - DNA, 739 bp, Homo sapiens
  SITE (230): n equals a,t,g, or c
acaatacatgcatcatatcttttgactttgaaggatatctcatgtcaaaggaatcaagttatgatttatagaggattcagctggaataccttgtgggtgctggctgagggtggcaaaacgcctaccgagacatgaaggttttagccactagttttgtccttgggagcctggggttggccttctacctgcctttggtggtgactacacctaaaacactggccatccctgangaagctgcaagaagctgtggggaaagttatcatcaatgccacaacctgtactgtcacctgtggccttggctataaggaggagaccgtctgtgaggtgggccctgatggagtgagaaggaaatgtcagactcggcgcttagaatgtctgaccaactggatctgtgggatgctccatttcaccattctcattggcaaggaatttgagcttagctgtctgagttcagacatcttggagtttggacaggaagctttccggttcacctgkakacttgctcgaggtgtcatctccactgacgatgaggtcttcaaaccctttcaagccaactcccactttgtgaagtttaaatatgctcaggagtatgactctgggacatatcgctgtgatgtgcagctggtaaaaaacttgagactcgtcaagaggctctattttgggttgagggtccttcctcctaacttggtgaatctgaatttccatcagtcacttactgaggatcaggactaatagagaa

SEQ ID NO: 64 - DNA, 476 bp, Homo sapiens
  SITE (297): n equals a,t,g, or c
  SITE (331): n equals a,t,g, or c
gaattcggcacgagaggacatggattatgggtactactcagcaggccagtttttactccacctctttctagctgacttgacacaagcaacaacccaacagaaaaccaatacttctgagaatggctgcaagtttgtttgtgctgtcttttgaggtaagaaatcaaggctgagctcttctttctcctaattctcaggaaggaggaaggcagatgtgagaacactgattgggtctgagtgtactgggcagcatcactgttaaaaggtcagcacacagatgcaagctcacttgtctgcttnctttcatgtgactgaagtggttaagaargttgtncaactcccccctgcacccccctcaccaccgcagtaagggagagacagggccaaacctgcagcttcggtagaagaggccaaggcaggtgtccaaggccagatcagcagtcagccagggcaaatgggctcactctggttacatgacc

SEQ ID NO: 65 - DNA, 696 bp, Homo sapiens
  SITE (11): n equals a,t,g, or c
tttcccccttntaatttttttgctatgaagaacatacaaagaacaactggcaaaacatgaatgtacacctgtaatttcagatggtcaaaatgaactggtgtaatctcctgacttttatggttgtattgtggttatgcagggagaatgtccttgctgggaggaaatacactgaagcatttggggatcgtgggtatatcagtttggcaacttactatcaaacagttcaggcgagggggaagctctttgtattataattgcaacttttctgtaggtgtgagattgtttcaaaataaaacaaaattatgtatttgaaaaataatcctcatcctcctttccaaacacataagattactgaagttaccttaggtgatagcagccctgggaattaatcatccacagctgatacttggaccaacacccctataagcaacactattccattcttagtaggaagggaggctcagttgagtgcagagccttctgagtttgggcccgaggcatttcaaggtagcctcttctctttttctactcataagcacaggcttagatgaaaaagagaaggaagaaaaagaactttgaattaatttgtctacacaatgggacagattgagaaaaaatttaaaatctgtgtcaagttcattgcattagaaacagtgaatcagcctgatataataaaagtacaattggtctcgtgcc

SEQ ID NO: 66 - DNA, 1890 bp, Homo sapiens
  SITE (260): n equals a,t,g, or c
ggcagagraaaaacaaaatgggtaatgcattcgaggtgacagggttaatgttggcattactttgttatgttgttgatgggcagaaacccaaggkggggttttkttgagcataaacacaagaagcaattatttgtggcactagacttaacccaaaggacagacccctacatgtatatagtagagaaatcctgtcttttagcactatctcacaggggaagctgaggaatcacattatctttaatataaataaatgaaatgcnagcactgtataatttatatccttaagcaactggattcamcgtaccactaatggcctggtcatgttttaaacattaccccaaaacagcctaactgttctgtgactcagtgtctctgtggaatcctatttagtagcaccatggtctctaaatgttttgattacacatcagtattaggaaaacatgtttgaagcattgtctaagtctgtttgtgctgatgtaacagaataccatagactgggkagtttataaagagagaaattattggcttacagttgtggaggctggaaagtctagtatcagcgtactgggatttggcaagggccttcttggtgcatgatagtatggtggaaggtatcacacggcaggcagaaaggcagagagagaacaaaagggggcgaacccactcccttgatgagaacctaaatacctcttaaaagtcctaactctcaatgctgtttacaatggcaaccaaatttaaacaagagttttgtagggaacaaacactcaatcaaaaccatagcaagtatgtaccatgactgtatgtgtatttataaaatacattcatatatttctacagcaatatatatgaggtacatttaagcatgtaaaaataggaatttttaaaaataggacagttgtaataatttctttgtacattccactttggagactgtttttatatggrgcttgttttatcaccaaaaggcattttaattttgcacactttagawttcttacaatgtgtaattgactgctagttgctgaacaaaggacagataaagtgtttcctgcacctgagcagcctaaaggtgagtgtaatacagatgcacaagtgactggttgataatggaatgagaccccttataagaaagacatacagagcacggcagaggagcaagaacmacacagaggcaatgacatttgagctaggcctcttatatctgtagatgaacatttgatggtaggtagtagggaagatggaactaagaatatttgagctacttaatatatgccaggcagcatgctgagtgcttgtgttcatttaattctcaagacagccataagcggcaatacaggtattgggcctattattctaaatcccattttataagagagttaggattagattcagttccatctttctacaaaacctggcactgtcattccaggcaaagggagtacaatccatttttctcttaagaggttgattttgccaatgagacagaatgaatctctacagcttgttaagtttcwacccgtctttgggtgactgaaaaattcaaatgtaaagatgtggcaaaattggttctctaaggattttaagtacagccaaatgatatgtcacaagttttttcctaaatatccaaccatttagtctttcataagcttttaattccactagcctcactttctgagattgttgatgttttcttgttctaacctgaaattttctttgtttgatgttaacaggagtataatgaaggagtaaccatttttattttatgatagtctatcaatagactttttttaaccttctttaagctaggtgtgtttgtcctttattaaagtcagtttgacccagcctgtacaacattgcaagaccttaactttaataaaaaaaaaaaaaaaa

SEQ ID NO: 67 - DNA, 1614 bp, Homo sapiens
  SITE (10): n equals a,t,g, or c
  SITE (1051): n equals a,t,g, or c
  SITE (1160): n equals a,t,g, or c
  SITE (1585): n equals a,t,g, or c
aaataagacntctttgagcagcgattgctggatcattgatctgtttgaggaatgtctgacctgggcctraragctggagaaggtgcagattcaaagtragcggctcctraggagagccccaagstgctcgccttctccgtggcttccgcagctaccgtctgcacggtgagagggcacgggcacacggttcgggctggcgtgcagtctcccagccagccacgctctgctcaggcctggaagtgaaagccgcctccttcccgttatgccccccatacaggagcctcggtttttcagcaaaacgcggccagtccccttctccactgctgcctcccagcagagggccccaggatctccaaggtcccagctatggctttggacaacgtggcttcggcccctggggttgcagagcttgcattgggtttacctcggtctcattcattcatggagccaagggtggggtttcacctgcgaacatcagactgacttgctggcgtcaagagcagttgactcactgatgaaggccctggtgaggagaaagcactctgttcttcgcctactctgtaatcgttttgtcataatgagccatgaaaaaagtaatgaacttgtgctgttaatcgtcactgtaatgagaagtcttacgtacaacatagctgtggtggctgcgtggtttaatggctgcattagataggatcctcacatcccattcagaaccaaaactgatacagtgaaacaattaaggtgagcaaatagttttaacttttctttttttttttaagtttcattcttcctagaatatttttctaacaatttttatttcagctttaaagatgggtcatatagccaaacgggccatataatccaacattgttgagatgtcttaggacatctaaggcaaaactggcacatttgttctgcagactattgcaggaatgttttttcctagcatttctatattatctgtccattctgaggaaccagtgaatgtcctataaatgcacctcctgtcaaaaccatgcctgagaggtcccggctgggagtgacagggtgcttncttagattctattggtccttctctcattctccgaacttactcctttttatgggtaagtcaactaggtyyacagtcccttatttttaatgcctaagttttgacagcaggnaagaaaacaattttttaaaaattctcattacatagacgcacaagaatatgtcacataaagaaaatgtgtttagaatactggttttctatttacgcatgatattttcctaagtaaaattgccaagtggacttggaagtccagaaaggaaaataatttaaattaatgctggtgatcttaacaatattttgtaaaatgatgcttcccccttctccatggtgtagtcaattttgtacaattaggtatctgactttacaagtttgttatcctttctaatttttactgaactgaaagcacaaagaagactacacagaaaatctggaaacagttgcaggtgttgggaggaagatgaaatcgagctgtcttttaactttcgtatgtgttttatcagaatttgctggactatgctagcaaggactttgtttacnatcaaattgtactagtgtctgcagggttt

SEQ ID NO: 68 - DNA, 596 bp, Homo sapiens
cttttcacccttagagacagggtttcacttttttgccttcttaatggagatattcagttttctttttttcatttaaacaaagaaaaaaaatgtatctactctaccttccctctgctctcctccctccctatcctacttgcccatatgagcacggctccccatggccacatactcctgcaaagcttttatgctgcttcgcttttctctaaacagatctgatattgctgctcctgtggttttctcaaaattaactttgccgtggtttttaaaaaggaatcaaaatgcattgttgcattaagctttttcaataaaggaaaattacggaaggaaaataggcaacaccagcaaattatatgtggacaggttctaaactctatatatacatatatatatatatatctatatatctatatacgtaatcatctagttctgtcatcttactgaaaggaataacacttctaaagatcaccatttctgagaagttcttggaaatctttatgtctaagtgattgtattagatcagcaataatgactatgtaatctcaaaaaacaaataaaatattcttaacatggaaaaaaaaaaaaaaaaaactcga

SEQ ID NO: 69 - DNA, 1524 bp, Homo sapiens
  SITE (1524): n equals a,t,g, or c
atccggaattcccgggtgtgttcgacccgtccgggactttgcacagcaccttccagcccaacatttcccagggaaaacttcagatgtgggtggatgttttccccaagagtttggggccaccaggccctcctttcaacatcacaccccggaaagccaagaaatactacctgcgtgtgatcatctggaacaccaaggacgttatcttggacgagaaaagcatcacaggagaggaaatgagtgacatctacgtcaaaggctggattcctggcaatgaagaaaacaaacagaaaacagatgtccattacagatctttggatggtgaagggaattttaactggcgatttgttttcccgtttgactaccttccagccgaacaactctgtatcgttgcgaaaaaagagcatttctggagtattgaccaaacggaatttcgaatcccacccaggctgatcattcagatatgggacaatgacaagttttctctggatgactacttgggtttcctagaacttgacttgcgtcacacgatcattcctgcaaaatcaccagagaaatgcaggttggacatgattccggacctcaaagccatgaacccccttaaagccaagacagcctccctctttgagcagaagtccatgaaaggatggtggccatgctacgcagagaaagatggcgcccgcgtaatggctgggaaagtggagatgacattggaaatcctcaacgagaaggaggccgacgagaggccagccgggaaggggcgggacgaacccaacatgaaccccaagctggacttaccaaatcgaccagaaacctccttcctctggttcaccaacccatgcaagaccatgaagttcatcgtgtggcgccgctttaagtgggtcatcatcggcttgctgttcctgcttatcctgctgctcttcgtggccgtgctcctctactctttgccgaactatttgtcaatgaagattgtaaagccaaatgtgtaacaaaggcaaaggcttcatttcaagagtcatccagcaatgagagaatcctgcctctgtagaccaacatccagtgtgattttgtgtctgagaccacaccccagtagcaggttacgccatgtcaccgagccccattgattcccagagggtcttagtcctggaaagtcaggccaacaagcaacgtttgcatcatgttatctcttaagtattaaaagttttattttctaaagtttaaatcatgtttttcaaaatatttttcaaggtggctggttccatttaaaaatcatctttttatatgtgtcttcggttctagacttcagcttttggaaattgctaaatagaattcaaaaatctctgcatcctgaggtgatatacttcatatttgtaatcaactgaaagagctgtgcattataaaatcagttagaatagttagaacaattcttatttatgcccacaaccattgctatattttgtatggatgtcataaaagtctatttaacctctgtaatgaaactaaataaaaatgtttcacctttaaaan

SEQ ID NO: 70 - DNA, 819 bp, Homo sapiens
  SITE (57): n equals a,t,g, or c
ggcacgagggagagggacggggagggggcgaggggcggaggccgagggggcaggggntgggcggcggccagtgtttacagatgagctttaactgccgcctcaggcgtggagacggagaccccgcagcccggcggcgcctcagcccttcaacgacagtattgagtggtcaggttacaataaaccggagagaaaaggtccgcttgcactttttttagttttcttatttttagacacccctcccctccagggtgatctttaaaaaagcaaaacaaaaaacacgacttttccagcgctcagcgttttttcctttcgtccgaagccgttttctgatttgacttttctcgccggccggtctcaggcccacagacgttccagaggaggagggtgacatttttactccctttttggggctaaccatttatgcttttgtacatcaaccgtgcgcggccggagggggcaggggggcgggggcgaggggcgttccaatcaaatttctaatttctgttaattattaatcccckttttactgcggtttctgttgtcatttttaaaatttttttaattttttttttttttttacttttactttttacctcttgtgtatatgtagggaatttatagggaaatatgtactttatggaataaattttaagaactaaaatatattttattttaaataaagtaatggacctttaatcttacacagctaaattactgattatatatttsctgagctgatttaagggttaaaaaaattgtatcaagagttttattttttgacttcaaagccttcttaataaagcctcttttctacatgtg

SEQ ID NO: 71 - DNA, 1442 bp, Homo sapiens
aattgcttggcatgagtttactttaatggctgtttctgagtttgatccctctccggaaccaaccsctctgatgtgtcctgttccagcaggaagagacagacctggaggttctgtacttgtgatttctggttgtggatcctgagaacaagaagtactgggatcctaaagttctgacatttgcaaagcagattaatgacctaccacattccagatcatttggtgayywtgtgttgtgcgtgtgggtgtgtgtgtgtgtgtgccaaattcaaggtggtcccagcctttctagtcttctctaacctttcttctcaraartcgcacctgttctgtctttctaggatataattttttttctattagcctgggtaacaccccaaccaataaagtttgcaatatccaagcctcctaatttctctacttattagcttatattaagcttcagcatgagcaagcctaaaaactcgccattatctggaaaagttctatttcacaggctttaatctctcctagagtagttagcactcttttgtggctttgtgttcctgtactagcttgaattccacagtctgacgttaataattagctccttaacacgtccatcctctcttgatgtcctgctctctatttttccttctttcttccaagttgggataaattcagcttcttattttcctgctccagamcttggttgtggagaaagatagaaaaagttccatacaggggactctgtgatcctgctaacatcattatttacctaagctctttagactccagtgaaagcttctgatttaatgtcatgtccctactttatgccacatgtcccataccattttctttgttttatgcaatttatttccactatctgatcccattccacccacatgactttgagtggaaaacttcatctcttcattgctgagtaaacaaacttcaggatgaacaagccctgtccactattttcccttttactktaaarkyctggaatttwwatgatctacgtttttttcctctgtttttattcttcactccatatcaacttacttggggatctacaccttcattcatycttttcattctgtcggcacctggctatggagtttacatttctcatcatatttactcctcataataatcctgtgaggtatataccactctgagtcttgtataagagaaaaagaaactgagatagggataactcaaagggataattcatttgctggagctaccaactagctactaaccatgctagaatggacagagatgacattcatgccaaagaccatgttgacttgctatctctacatttgctctaagtttagaaaaaaaaaatcccttcaatttatcctccaacagtcttcttagaaccttaccatggatgccttgtwtaacacatttcacctttctggtaaaaaaaaaaaaaaaaaaaaaaaaaaaaaactcga

SEQ ID NO: 72 - DNA, 1223 bp, Homo sapiens
  SITE (1194): n equals a,t,g, or c
  SITE (1210): n equals a,t,g, or c
  SITE (1221): n equals a,t,g, or c
aacctgaggaggctgtcatgataggagatgattgcagggatgatgttggtggggctcaagatgtcggcatgctgggcatcttagtaaagactgggaaatatcgagcatcagatgaagaaaaaattaatccacctccttacttaacttgtgagagtttccctcatgctgtggaccacattctgcagcacctattgtgaagcaatgtgtgcatctgaagcaacttgaaatgcagcttcttattgtctggaatgaatcccttaccaactcagtgccagcatcggtagacaccagtcagtgctgatcgctttttaaccctcttttgttgtgcattaattagaaagaaaggtattgaattgcggctagccagtaagccttgctaatctcttttattttgtaactgaagatgagacccaaagaaagggaaagctgagattttgtgccattccttttaaaatattcatcaggttaggtggggctgtgggggaaaagctactacagggaagagtgttctctgctgtctcttcactggaaaacagggaggggggatttcagactgtgaagaaagttgaatggtggtttttaaattataaagtaatgtattaaaaggtgcattaggctgtagttctaatattgagttcaactgtgaaatccatcagatgtgccaaatggagaagacagaaagcaacaaagtgaattgttctttagcccaagtggtacagtgaatttgctttaacagatgttgaaaactaaattttctactgtattcccagcacgggtgacttctttttctcttcattagccagagatgactaatttaaatttagaaccagattttaatttaaattaatatttccattaataacctattcattgcagatacctattatactgtgtaacagttgttttggaaattttatgtaaaattaaaactatcagtattttacagatgttttaattagacatgttattaacaggaacagtgcagaaactagaatcaagccttataatatcttatagaccatgcattttgaagttagtgtccactarggtcctattaactgtacattgcaagattcattattttgcctctgacactawgggaaaatttttagaagccaatgggacagattccagcctttaagcactgggtactacagccgtaaaaggaaatcccgcctggtagccagggatatncctccccaggttaaanccccccaaatnaa

SEQ ID NO: 73 - DNA, 1814 bp, Homo sapiens
  SITE (1764): n equals a,t,g, or c
  SITE (1775): n equals a,t,g, or c
  SITE (1781): n equals a,t,g, or c
caagctttgtacttagatcttttacttagatctgctttttgtcttattctttttagtggatgtttccaaggattgtcttcagtcatggccttgggattaaagtgcttccgcatggtccaccctacctttcgcaattatcttgcagcctctatcagacccgtttcagaagttacactgaagacagtgcatgaaagacaacatggccataggcaatacatggcctattcagctgtaccagtccgccattttgctaccaagaaagccaaagccaaagggaaaggacagtcccaaaccagagtgaatattaatgctgccttggttgaggatataatcaacttggaagaggtgaatgaagaaatgaagtctgtgatagaagctctcaaggataatttcaataagactctcaatataaggacctcaccaggatcccttgacaagattgctgtggtaactgctgacgggaagcttgctttaaaccagattagccagatctccatgaagtcgccacagctgattttggtgaatatggccagcttcccagagtgtacagctgcagctatcaaggctataagagaaagtggaatgaatctgaacccagaagtggaagggacgctaattcgggtacccattccccaagtaaccagagagcacagagaaatgctggtgaaactggccaaacagaacaccaacaaggccaaagactctttacggaaggttcgcaccaactcaatgaacaagctgaagaaatccaaggatacagtctcagaggacaccattaggctaatagagaaacagatcagccaaatggccgatgacacagtggcagaactggacaggcatctggcagtgaagaccaaagaactccttggatgaaagtccactggggccagcaatactccagagcccagtttctgctggatcccatgggtggcacattgggacttctctccctcccccatctacacagaagactgtcaccatgctgacagaagcctgtccttgtaaggcccagccttccaggggaacactcagacatgttcattctcttcctgcttctgctctgggccggtgggtggctctcagaaawtacttgctgctggcaaaaggcctgtactcaggcatttgctttgacttgatgttgccaagggactgaggccattggcaggcttagtaccacctgctcctcatcttaggagtctccttttcaaataattaggctctgttcccattttaaaactctgatattggccttcacctgtgactggacactttactagaggcccattttcactaaacaataaaatctaaataaattggaaggaataacaaccacaaaggaaagaatagagttggtctggattgatgatcactgaggatctgtatgtgaggcacccataacagtagttttgcctgtgagtcgtcttcacacatgctgttttctctgcctggctctctcttcccctccttacctggccagtcctgtttatcatcaggccttgtcttggatatcacgtcctctgggaagtcttcttttcccctctaacctaggaccctcattaccggctctcatagcacagtctactgctttgtacgaattctaagtattcttgttgcacttaattagcctgtatatcctcagaactttgtgtaatgcctggagcatagtaggcagtcatatgttgtatcgtgaataaattgcacatagtagctacccagcaaatgctgacttcttttctttctagtcttaacactccctttctaatncatttccactnttgtantgttctcaacattacttggtagtgacaaacttt

SEQ ID NO: 74 - DNA, 4712 bp, Homo sapiens
catggtacgcctgcaggtaccggtccggaattcccgggtcgacccacgcgtccgcccaygcgtccggcggctccgagccaggggctattgcaaagccagggtgcgctaccggacggagaggggagagccctgagcagagtgagcaacatcgcagccaaggcggaggccgaagaggggcgccaggcaccaatctccgcgttgcctcagccccggaggcgccccagagcgcttcttgtcccagcagagccactctgcmtgcgcctgcctctcagtgtmtccaactttgcgctggaagaaaaacttcccgcgcgccggcagaactgcagcgcctcctcttagtgactccgggagcttcggctgtagcckgctmtgcgcgcccttccaacgaataatagaaattgttaattttaacaatccagagcaggccaacgaggctktgctctcccgacccgaactaaagctccctcgctccgtgcgctgctacgagcggtgtctcctggggctccaatgcagcgagctgtgcccgaggggttcggaaggcgcaagctgggcagcgacatggggaacgcggagcgggctccggggtctcggagctttgggcccgtacccacgctgctgctgctcsccgcggcgctactgsccgtgtcggacgcactcgggcgcccctccgaggaggacgaggagctagtggtgccggagctggagcgcgccccgggacacgggaccacgcgcctccgcctgcacgcctttgaccagcagctggatctggagctgcggcccgacagcagctttttggcgcccggcttcacgctccagaacgtggggcgcaaatccgggtccgagacgccgcttccggaaaccgacctggcgcactgcttctactccggcaccgtgaatggcgatcccagctcggctgccgccctcagcctctgcgagggcgtgcgcggcgccttctacctgctgggggaggcgtatttcatccagccgctgcccgccgccagcgagcgcctckccaccgccgccccaggggagaagccgccggcaccactacagttccacctcctgcggcggaatcggcagggcgacgtaggcggcacgtgcggggtcgtggacgacgagccccggccgactgggaaagcggagaccgaagacgaggacgaagggactgagggcgaggacgaagggcctcagtggtcgccgcaggacccggcactgcaaggcgtaggacagcccacaggaactggaagcataagaaagaagcgatttgtgtccagtcaccgctatgtggaaaccatgcttgtggcagaccagtcgatggcagaattccacggcagtggtctaaagcattaccttctcacgttgttttcggtggcagccagattgtwcaaacaccccagsattcgtaattcagttagcctggtggtggtgaagatcttggtcatccacgatgaacagaaggggccggaagtgacctccaatgctgccctcactctgcggaacttttgcaactggcagaagcagcacaacccacccagtgaccgggatgcagagcactatgacacagcaattcttttcaccagacaggacttgtgtgggtcccagacatgtgatactcttgggatggctgatgttggaactgtgtgtgatccgagcagaagctgctccgtcatagaagatgatggtttacaagctgccttcaccacagcccatgaattaggccacgtgtttaacatgccacatgatgatgcaaagcagtgtgccagccttaatggtgtgaaccaggattcccacatgatggcgtcaatgctttccaacctggaccacagccagccttggtctccttgcagtgcctacatgattacatcatttctggataatggtcatggggaatgtttgatggacaagcctcagaatcccatacagctcccaggcgatctccctggcacctcgtacgatgccaaccggcagtgccagtttacatttggggaggactccaaacactgccctgatgcagccagcacatgtagcaccttgtggtgtaccggcacctctggtggggtgctggtgtgtcaaaccaaacacttcccgtgggcggatggcaccagctgtggagaagggaaatggtgtatcaacggcaagtgtgtgmacaaaaccgacagaaagcattttgatacgccttttcatggaagctggggaatgtgggggccttggggagactgttcgagaacgtgcggtggaggagtccagtacacgatgagggaatgtgacaacccagtcccaaagaatggagggaagtactgtgaaggcaaacgagtgcgctacagatcctgtaaccttgaggactgtccagacaataatggaaaaacctttagagaggaacaatgtgaagcacacaacgagttttcaaaagcttcctttgggagtgggcctgcggtggaatggattcccaagtacgctggcgtctcaccaaaggacaggtgcaagctcatctgccaagccaaaggcattggctacttcttcgttttgcagcccaaggttgtagatggtactccatgtagcccagattccacctctgtctgtgtgcaaggacagtgtgtaaaagctggttgtgatcgcatcatagactccaaaaagaagtttgataaatgtggtgtttgcgggggaaatggatctacttgtaaaaaaatatcaggatcagttactagtgcaaaacctggatatcatgatatcatcacaattccaactggagccaccaacatcgaagtgaaacagcggaaccagaggggatccaggaacaatggcagctttcttgccatcaaagctgctgatggcacatatattcttaatggtgactacactttgtccaccttagagcaagacattatgtacaaaggtgttgtcttgaggtacagcggctcctctgcggcattggaaagaattcgcagctttagccctctcaaagagcccttgaccatccaggttcttactgtgggcaatgcccttcgacctaaaattaaatacacctacttcgtaaagaagaagaaggaatctttcaatgctatccccactttttcagcatgggtcattgaagagtggggcgaatgttctaagtcatgtgaattgggttggcagagaagactggtagaatgccgagacattaatggacagcctgcttccgagtgtgcaaaggaagtgaagccagccagcaccagaccttgtgcagaccatccctgcccccagtggcagctgggggagtggtcatcatgttctaagacctgtgggaagggttacaaaaaaagaagcttgaagtgtctgtcccatgatggaggggtgttatctcatgagagctgtgatcctttaaagaaacctaaacatttcatagacttttgcacaatggcagaatgcagttaagtggtttaagtggtgttagctttgagggcaaggcaaagtgaggaagggctggtgcagggaaagcaagaaggctggagggatccagcgtatcttgccagtaaccagtgaggtgtatcagtaaggtgggattatgggggtagatagaaaaggagttgaatcatcagagtaaactgccagttgcaaatttgataggatagttagtgaggattattaacctctgagcagtgatatagcataataaagccccgggcattattattattatttcttttgttacatctattacaagtttagaaaaaacaaagcaattgtcaaaaaaagttagaactattacaacccctgtttcctggtacttatcaaatacttagtatcatgggggttgggaaatgaaaagtaggagaaaagtgagattttactaagacctgttttactttacctcactaacaatggggggagaaaggagtacaaataggatctttgaccagcactgtttatggctgctatggtttcagagaatgtttatacattatttctaccgagaattaaaacttcagattgttcaacatgagagaaaggctcagcaacgtgaaataacgcaaatggcttcctctttccttttttggaccatctcagtctttatttgtgtaattcattttgaggaaaaaacaactccatgtatttattcaagtgcattaaagtctacaatggaaaaaaagcagtgaagcattagatgctggtaaaagctagaggagacacaatgagcttagtacctccaacttcctttctttcctaccatgtaaccctgctttgggaatatggatgtaaagaagtaacttgtgtctcatgaaaatcagtacaatcacacaaggaggatgaaacgccggaacaaaaatgaggtgtgtagaacagggtcccacaggtttggggacattgagatcacttgtcttgtggtggggaggctgctgaggggtagcaggtccatctccagcagctggtccaacagtcgtatcctggtgaatgtctgttcagctcttctgtgagaatatgattttttccatatgtatatagtaaaatatgttactataaattacatgtactttataagtattggtttgggtgttccttccaagaaggactatagttagtaataaatgcctataataacatatttatttttatacatttatttctaatgaaaaaaacttttaaattatatcgcttttgtggaagtgcatataaaatagagtatttatacaatatatgttactagaaataaaagaacacttttggaaaaaaaaaaa

SEQ ID NO: 75 - DNA, 1647 bp, Homo sapiens
  SITE (1061): n equals a,t,g, or c
  SITE (1621): n equals a,t,g, or c
  SITE (1622): n equals a,t,g, or c
  SITE (1639): n equals a,t,g, or c
  SITE (1644): n equals a,t,g, or c
acccacgcgtccggtcaagaatcgctctataagatctgcaaggcctactctgtgtatgatgaagacattgggtactgtcaagggcagtcttttcttgctgctgtattactgctgcatatgccagaggaacaagcattctgtgttttggtgaaaatcatgtacgactatggtttgagagacctctacagaaacaacttcgaagatcttcattgcaaattctaccagttggagagactaatgcaggaacagctaccggacctgcatagccatttttctgatctgaacctggaagctcatatgtatgcatcccagtggtttctcactctttttactgccaagttcccactctgcatggtgttccacatcattgacttactgctttgtgagggtttgaacataatctttcatgtagctttggctctcctaaagacctcaaaggaagaccttctgcaggctgattttgaaggtgctttaaagttctttagagttcagcttccaaagagatacagggcagaggaaaatgcaagaagactgatggagcaggcttgcaatattaaagtaccaaccaagaagctgaagaaatatgagaaagaatatcagacaatgcgagagagtcagctgcaacaggaagacccaatggatagatacaagtttgtatatttgtaggtaactccagctgttgcatttatactgggaatcttcataagaagctgagagaaagagaggggaaaaagaaagtggctttctactttcaaaaatgaaacaaaaaggaaaaatggcaaagtactgttttagctgtgcatgtcatatccacaaagacttttagcaggtgaactgttccaagactgacacaaggatgtttcaaacttgcctctgtctgtagaaaatgttaaaaataccaactcacttggaaggaaaaataaaaatcacaaaggtatattgagcacagtagtggtgtttgttgcaacatttatttccacaaatgaatttatgaacaacagtgatatttgacttaaagtatgaagtttcagaatcaaaataatttcattttaatacgttcngttaattgtgaatctcttcmatggtaattagcaacactgttcccaggatgcaaagttgggaaacacttatttccaacttatttttttccaagtaaaatattatctctcttcaacatgctttaacttttcagactcacacagatacgtwacagctccttctccctccatatcaatacactaagataaaagaatactgtattttcagcactgagcagcagtgccaaaatctcctgccaagaaatggactgtgtggcattattaattaaatcacccacattgggatgacttccacttttgtaactagagttatctttatgtggtcagagctggacataggcagcatagtcacacagaacatcttatctctgttgctgaattgaatagcatgggatgtgtgcagaggaacatggtgggagtatgtaggttttgtagtcagacagacctgaactcaaatcttgctcattttttagagcacaggatttggactccaaattgagggttttaatccccatgccaccattcagcatcttcgactagttattgaaccttttcctcatggnnaaaagattatagtgtgnagcgngaa

SEQ ID NO: 76 - DNA, 890 bp, Homo sapiens
  SITE (280): n equals a,t,g, or c
ttcaaactagcaaaaaatgtatgaaactatgaagctcgatgcgtgtratcatcagcagaggccgacgctgcaggcagggccaaagcttctgaccctggcccccagggaggaacccagaggccagtcagggaggggcagcgagctcacggccaggcagcgccacagcactggcgaccctcagggagaacaggcactacccagggctggatgcgtaacgggccccccggccacaccccaccgcccatcagagccgcagctcctgagaacgcatccggatgcnaggccaaagtcagccatggcacaaacatttgtgcatcaaggtcctgttgctctgcaacaactcaccacaaacagaagggtggaaacctccatgtcatcggacggccacggscagaatccaacgccatctccctgggctgatgtctgtgcaagcagggctgatgccgtagcttttccggcttctggaarctgccacagcccctggctcatggsaccatcctcacatcctctgaatccacattctcctctgaatctcccgcctccctctttccactgtaaggaccctgtgatgacactgcaccctcagaccctggtaacccagggtcatctttccacctcagggcgtctgacttaagcctgcctggagggtccctgtggtcacattcatgggttccaggcttcagacacggccactttgtgggatcattactctgcctaccacaccatgtggccctgtgtgtgttttcagggggcatttgcgcytatatgcaaataatacatatatgaataaacgtgtgaatggtggtcacgtaggagarggcatctgtatggggccacacctgtaaaaaaaaaaaaaaaaaaaaaaaaaaaaaaaaaaaaaaaaaaaaaaa

SEQ ID NO: 77 - DNA, 1657 bp, Homo sapiens
  SITE (266): n equals a,t,g, or c
agaacggccttccccacatcttccagcacctgcgcgcctgaatccgtcccacccaggcccagacgcaggcttcttctcgggtcttggtcctgcatcctctctctcccagagcctccgttaggggtgggaaaggactttgccataggtcgctgaggccaccatctgctctcttactggccaagggcgtaaaaagatagtcytcccattagctagagagcaaaccccagaaagcctattggctgcgccgtccgcgggccttggtccgntttgaaggcgggctgcggctgcgagaggagggcgggcgggaggctagctgttgtcgtggttgctcggaggcacgtgtgcagtcccggaagcggcgaggggaaactgctccgcgcgcgccgcgggaggaggaaccgcccggtcctttagggtccgggcccggccgggcatggattcaatgcctgagcccgcgtcccgctgtcttctgcttcttcccttgctgctgctgctgctgctgctgctgccggccccggagctgggcccgagccaggccggagctgaggagaacgactgggttcgcctgcccagcaaatgcgaagggacttgcggttaatcgaagtcactgagaaccatttgcaagaggctcctggattatagcctgcacaaggagaggaccggcagcaatcgatttgccaagggcatgtcagagacctttgagacattacacaacctggtacacaaaggggtcaaggtggtgatggacatcccctatgagctgtggaacgagacttctgcagaggtggctgacctcaagaagcagtgtgatgtgctggtggaagagtttgaggaggtgatcgaggactggtacagraaccaccaggaggaagacctgactgaattcctctgcgccaaccacgtgctgaagggaaaagacaccagttgcctggcagagcagtggtccggcaagaagggagacacagctgccctgggagggaagaagtccaagaagaagagcakcagggccaaggcagcaggcggcaggagtagcagcagcaaacaaaggaaggagctgggtggccttgagggagaccccagccccgaggaggatgagggcatccagaaggcatcccctctcacacacagcccccctgatgagctctgagcccacccagcatcctctgtcctgagacccctgattttgaagctgaggagtcaggggcatggctctggcaggccgggatggccccgcagccttcagcccctccttgccttggctgtgccctcttctgccaaggaaagacacaagccccaggaagaactcagagccgtcatgggtagcccacgccgtcctttcccctccccaagtgtttctctcctgacccagggttcaggcaggccttgtggtttcaggactgcaaggactccagtgtgaactcaggaggggcaggtgtcagaactgggcaccaggactggagccccctccggagaccaaactcaccatccctcagtcctccccaacagggtactaggactgcagccccctgtagctcctctctgcttacccctcctgtggacaccttgcactctgcctggcccttcccagagcccaaagagtaaaaatgttctggttctgawraaaaaaaaaaaaaaaaaaaccccggggggggcccgt

SEQ ID NO: 78 - DNA, 2015 bp, Homo sapiens
  SITE (828): n equals a,t,g, or c
  SITE (2007): n equals a,t,g, or c
  SITE (2009): n equals a,t,g, or c
ggccgggctgagagaagagcttgcggggtttgcggttgatggccccgactgaagggctggaggcggtgtatgccgctgttcttgctgtcgctcccgacacctccgtccgcttctggtcatgagaggagacagaggcctgaagcaaagacatctgggtcagagaaaaagtatttaagggccatgcaagccaatcgtagccaactgcacagtcctccaggaactggaagcagtgaggatgcctcaacccctcagtgtgtccacacaagattgacaggagagggttcttgccctcattctggagatgttcatatccagataaactccatacctaaagaatgtgcagaaaatgcaagctccagaaatataaggtcaggtgtccatagctgtgcccatggatgtgtacacagtcgcttacggggtcactcccacagtgaagcaaggctgactgatgatactgccgcagaatctggagatcatggtagtagctccttctcagaattccgctatctcttcaagtggctgcaaaaaagtcttccatatattttgattctgagcgtcaaacttgttatgcagcatataacaggaatttctcttggaattgggctgctaacaacttttatgtatgcaaacaaaagcattgtaaatcaggtttttctaagagaaaggtcctcaaagattcagtgtgcttggttactggtattcttagcaggatcttctgttcttttatattacacctttcattctcagtcactttattacagcttaatttttttaaatcctactttggaccatttgagcttctgggaagtatttkggattgttggaatnacagacttcattctgaaattctttttcatgggcttaaaatgccttattttattggtgccttctttcatcatgccttttaaatctaagggttactggtatatgcttttagaagaattgtgtcaatactaccgaacttttgttcccataccagtttggtttcgctaccttataagctatggggartttggtmacgtaactagatggartcttgggatactgctggctttactctacctcatattaaaacttttggaattttttgggcatctgagaactttcagacaggttttacgaatattttttacacmaccmagttatggagtggctgccagcaagagacagtgttcagatgtggatgatatttgttcaatatgtcaagctgaatttcagaagccaattcttctcatttgtcagcatatattttgtgaagagtgcatgaccttatggtttaacagagagaaaacatgtccactctgcagaactgtgatttcagaccatataaacaaatggaaggatggagccacttcatcacaccttcaaatatattaagttgtataaactatcaaggccacaaaatactaatgtcatttggtcataatgactactgataaggcatcagaatggattttcagggctaccagaaaaatgtttccagatggttttagaatgtaggacttatgatccaattcaccaaaagattaaatgaaaccaccctgtgttttaaaatatatataatgttcaacctaatgtatatgcaacatttattctattctaattatttgacaggtaactgcagtgttaaattgtaaatgtgttttctttatgttaccaaaacagcaatttgaaattagaactagtggttttagagaactcaggtattctttcctgacattgttttcagaataaagaatatttttcataatattttaagatacatactatctaaaagtagaattttgttcagcattgacttttataattcccatcctaaaaattcttaatattttcataaaatttgtatttttaaatgaaaattctaaatgttgtattttatcagtaacattttctaagtgaagattaatttactgaggatgatacattatagtattgtattattctctgtagtaagattagtaataagtgaaaataaatgatttaaattcaaaaaaaaaaaaaaantnactcga

SEQ ID NO: 79 - DNA, 1213 bp, Homo sapiens
  SITE (1172): n equals a,t,g, or c
  SITE (1210): n equals a,t,g, or c
agcctagttacagattgcactgcgtcagactgttccacacccagaagacgtcaggtgacttcagtcctgctgcagttgtgcagcagaggagactgcagacttcggttgaggaaacgggtatttcatgtctcagggagtaggtttgtgcagttacagcttttctgttggtatgcataattaataattggagctgcaaascagatcgtgacaagagatggacggtcagaagaaaaattggaaggacaaggttgttgacctcctgtactggagagacattaagaagactggagtggtgtttggtgccagcctattcctgctgctttcattgacagtattcagcattgtgagcgtaacagcctacattgccttggccctgctctctgtgaccatcagctttaggatatacaagggtgtgatccaagctatccagaaatcagatgaaggccacccattcagggcatatctggaatctgaagttgctatatctgaggagttggttcagaagtacagtaattctgctcttggtcatgtgaactgcacgataaaggaactcaggcgcctcttcttagttgatgatttagttgattctctgaagtttgcagtgttgatgtgggtatttacctatgttggtgccttgtttaatggtctgacactactgattttggctctcatttcactcttcagtgttcctgttatttatgaacggcatcaggcacagatagatcattatctaggacttgcaaataagaatgttaaagatgctatggctaaaatccaagcaaaaatccctggattgaagcgcaaagctgaatgaaaacgcccaaaataattagtaggagttcatctttaaaggggatattcatttgattatacgggggagggtcagggaagaacgaaccttgacgttgcagtgcagtttcacagatcgttgttagatctttatttttagccatgcactgttgtgaggaaaaattacctgtcttgactgccatgtgttcatcatcttaagtattgtaagctgctatgtatggatttaaaccgtaatcatatctttttcctatctgaggcactggtggaataaaaaacctgtatattttactttgttgcagatagtcttgccgcatcttggcaagttgcagagatggtggagctagaaaaaaaaaaaaaaaaanctygagactagcggcacgagggggggcccgtacccaanacg

SEQ ID NO: 80 - DNA, 1391 bp, Homo sapiens
  SITE (1350): n equals a,t,g, or c
gcagaggccgactgctgaaggtggtttgcgtcgacatggcggttaccctgagtctcttgctgggcgggcgcgtttgcgcgccgtcactcgctgtgggttcgcgacccggggggtggcgggcccaggccctattggccgggagccggaccccgattccgactgggagccggaggaacgggagctgcaggaggtggagagcaccctgaaacgacagaaacaagcaatccgattccagaaaattcggaggcaaatggaggcgcctggtgccccgcccaggaccctgacgtgggaagccatggagcagatacggtatttacatgaggaatttccagagtcctggtcagttcccaggttggctgaaggctttgatgtcagcactgatgtgatccgaagagttttaaaaagcaagtttttacccacattggagcagaagctgaagcaggatcaaaaagtccttaagaaagctgggcttgcccactcgctgcagcacctccggggctctggaaatacctcaaagctgctccctgcaggccactctgtatcaggctctttgcttatgccagggcatgaagcctcatctaaagacccaaatcacagcacagctttgaaagtgatagagtcagacactcacaggacaaatacaccaaggagaaggaagggaagaaataaagaaatccaggacctggaggagagctttgtgcctgttgctgcacccctaggtcatccaagagagctgcagaagtactccagtgattctgagagccccagaggaactggcagtggtgcgttgccaagtggtcagaagctggaggagttgaaggcagaggagccagataacttcagcagcaaagtagtgcagaggggccgagagttctttgacagcaacgggaacttcctgtacagaatttgagtcggggcttggcttatggagatgcctcgtgaaacacagctgggcaagtattaatgtatatggaacagcctggatttctgcatatggataagccaccttggaataggaagaggtgttgagcctggactgtgggaggaaagagctgcgtggatagattcaaacttcctgtggtagtgctcccagtctgacctctgtagaccttcagtactcactcttcttgcttaggctctctgtgtgttgaaagccatcccgtgttgcatgtgttgttacaattttctgtgatacttgcaatttatgtttgagaagaagtgaaaagtttgccttctgacctcatttccttcttgatcagtgaacactaacattttggggacaacttagtcaattggttttccttacaacaaaataaagtaaaatgtagcaaaaaaaaaaaaaaaaaaacncggggggggcccgtcccattgcccaaaagggggccgaataa

SEQ ID NO: 81 - DNA, 1008 bp, Homo sapiens
tgacatcgccctcatgaagctgcagttcccactcactttctcaggcacagtcaggcccatctgtctgcccttctttgatgaggagctcactccagccaccccactctggatcattggatggggctttacgaagcagaatggagggaagatgtctgacatactgctgcaggcgtcagtccaggtcattgacagcacacggtgmaatgcagacgatgcgtaccagggggaagtcaccgagaagatgatgtgtgcaggcatcccggaagggggtgtggacacctgccagggtgacagtggtgggcccctgatgtaccaatctgaccagtggcatgtggtgggcatcgttagctggggctatggctgcgggggcccgagcaccccaggagtatacaccaaggtctcagcctatctcaactggatctacaatgtctggaaggctgagctgtaatgctgctgcccctttgcagtgctgggagccgcttccttcctgccctgcccacctggggatyccccaaagtcagacacagagcaagagtccccttgggtacamccctytgcccacagcctcagcatttcttggagcagcaaagggcctcaattcctataagagaccctcgcagcccagaggcgcccagaggaagtcagcagccctagctcggccacacttggtgctcccagcatcccagggagagacacagcccactgaacaaggtctcaggggtattgctaagccaagaaggaactttcccacactactgaatggaagcaggctgtcttgtaaaagcccagatcactgtgggctggagaggagaaggaaagggtctgcgccagccctgtccgtcttcacccatccccaagcctactagagcaagaaaccagttgtaatataaaatgcactgccctactgttggtatgactaccgttacctactgttgtcattgttattacagctatggccactattattaaagagctgtgtaacatcaaaaaaaaaaaaaaaaaactcga

SEQ ID NO: 82 - DNA, 1261 bp, Homo sapiens
  SITE (481): n equals a,t,g, or c
gttttcaaactcatttctaagccaaatagtttagataaatatttacccttatatttggggggaattcaggctcaccatttgccgaggcaagcccatcaacagtctagaggcatattctgtgtcattccttcccgtctccttcatagaatactactttttccttttgtctcctggccattctccatcatctgctgattattgctaaccacaggatgctggcaaagcttacagtgataggcacatgtgttcagtgatgtccaatacactcttatcacagtggttattgcttcttactcttttcaaatgcattattctacccctcaacctayatccaatcattagaactatacctgactggagcccagaacttgggaccaatacttaattcaaatagcaggggcttgctcacaaacattaagcccaamaagaagcacagcactttkgaaaagtcaaataggsctttggtagctctgtacatttngcaatttacattgttattaagtttatagcactaataacacttcagtcgtgaatctacagtctcaatatgataagtcttagaacatgttctagaaatagtggtaccttgctgctattatacttagtaacttataccccaatataataataagtattaaatacagattgtgtatgcattctttgtgtgtatatgccaactgtactacttaacctcactgatgagcaattagaaaaatacacaaattgtcatagtgaaaataagtcttggtcaattcagatgatacgtgaacctgataaatgctctaatagatatgctattttgtcctgtattgcttgttttacagtatggtgcatgttgtttgctaagtaaaatgataataataataaagtatacccaattttaaggttagaattaaaattttgcacatatgcttcttgatattctgaaatgtattctgtggsttmattatcttattcatacacattkmgctwggctttttacccctaggaaataactgtccaagtatatatctcgtcttctttcttgtaactttgattaaactgcttacttcaacttacaacattgtaaagccagaatacctcattttaacagtgaaaaaaaatattatgacctgatgtgttctcttgtatttgatttgaactacctaaataggcttaactgtaataataaatatacaattttggcaaaaaaaaaaaaaaaaaaaaaaaaaaaaaaaaaaaaaaaaaaaaaaaaaaaaaaaaaaaaaaaaaaagggcggcc

SEQ ID NO: 83 - DNA, 1045 bp, Homo sapiens
  SITE (626): n equals a,t,g, or c
  SITE (906): n equals a,t,g, or c
  SITE (987): n equals a,t,g, or c
  SITE (1041): n equals a,t,g, or c
tcgagtttttttttttttttttttaagcaacagtttattgagacggaaaaaatatgatccagcaaaggcgaggaggcgagccgggccccgagccagctggtgtcattgtcactggctcccaaacctgactcctgtggacgtgtctgtaccccaaacacagctgcccaccccagccctggcacagagcccttctgaaagaaagaaaaaagaagaaagacgcggcacctgacgccagcgggtaaaagcagggccccagaggcatttattgaaaacacagcatccaaaacacgacatctaggccaggcgcgatggttacagtgatgagagggtcactagacaattatccacaattctacgacatgagacagagactcagcaacagtcacagacagaagggtcatgtgttccttcctgggcagggctgaatgtggcaggtgcggcgtggaggctgcgtcctggcggtttgctcccaggcaaggggtacggggggccggcttggctgggtggggacctcaagtctgagggtgaggatggctgaatctacctcgcttatgtctcagggacggtcacccatacctaggatgaccccagccagaccctagaaggtctgatggccatcccaagtncccccgcgaggagaagagttccctggcaggggtgacacattcccggtcaacaagccacaacacagtggtgcctgcactctctcagctgttgccacaacacttggtgctggaattttctccacgtagtgaaacttttaagggacacatgaataatttaaaaagtcacacaaaactctacgaaaggcaggaatcctcactctgctgagagctacctcctgagatgtcgcttccggaccccggcagagggcaggagcgacatcagctcggcaggaggatcctngccagcgcgagggctggctctggttattataaataatctaatttaaatacgcacatacacacagatgtcctgcttctaccnaacgccaagaaaagcagacattagcatcacactgtcaacacttcctcgagaacngaag

SEQ ID NO: 84 - DNA, 2877 bp, Homo sapiens
gaattcggcacgagacaagatggcagtcaacagcttcccaaaagatagggattacagaagagaggtgatcacagacatgaaaagatgcgagacgccggagatccttcaccaccaaataaaatgttgcggagatctgatagtcctgaaaacaaatacagtgacagcacaggtcacagtaaggccaaaaatgtgcatactcacagagttagagagagggatggtgggaccagttactctccacaagaaaattcacacaaccacagtgctcttcatagttcaaattcacattcttctaatccaagcaataacccaagcaaaacttcagatgcaccttatgattctgcagatgactggtctgagcatattagctcttctgggaaaaagtactactacaattgtcgaacagaagtttcacaatgggaaaaaccaaaagagtggcttgaaagagaacagagacaaaaagaagcaaacaagatggcagtcaacagcttcccaaaagatagggattacagaagagaggtgatgcaagcaacagccactagtgggtttgccagtggaatggaagacaagcattccagtgatgccagtagtttgctcccacagaatattttgtctcaaacaagcagacacaatgacagagactacagactgccaagagcagagactcacagtagttctacgccagtacagcaccccatcaaaccagtggttcatccaactgctaccccaagcactgttccttctagtccatttacgctacagtctgatcaccagccaaagaaatcatttgatgctaatggagcatctactttatcaaaactgcctacacccacatcttctgtccctgcacagaaaacagaaagaaaagaatctacatcaggagacaaacccgtatcacattcttgcacaactccttccacgtcttctgcctctggactgaaccccacatctgcacctccaacatctgcttcagcggtccctgtttctcctgttccacagtcgccaatacctcccttacttcaggacccaaatcttcttagacaattgcttcctgctttgcaagccacgctgcagcttaataattctaatgtggacatatctaaaataaatgaagttcttacagcagctgtgacacaagcctcactgcagtctataattcataagtttcttactgctggaccatctgctttcaacataacgtctctgatttctcaagctgctcagctctctacacaagcccagccatctaatcagtctccgatgtctttaacatctgatgcgtcatccccaagatcatatgtttctccaagaataagcacacctcaaactaacacagtccctatcaaacctttgatcagtactcctcctgtttcatcacagccaaaggttagtactccagtagttaagcaaggaccagtgtcacagtcagccacacagcagcctgtaactgctgacaagcmgcaaggtcatgaacctgtctctcctcgaagtcttcagcgctcaagtagccagagaagtccatcacctggtcccaatcatacttctaatagtagtaatgcatcaaatgcaacagttgtaccacagaattcttctgcccgatccacgtgttcattaacgcctgcactagcagcacacttcagtgaaaatctcataaaacacgttcaaggatggcctgcagatcatgcagagaagcaggcatcaagattacgcgaagaagcgcataacatgggaactattcacatgtccgaaatttgtactgaattaaaaaatttaagatctttagtccgagtatgtgaaattcaagcaactttgcgagagcaaagggatactatttttgagacaacaaattaaggaacttgaaaagctaaaaaatcagaattccttcatggtgtgaagatgtgaataattgcacatggttttgagaacaggaactgtaaatctgttgcccaatcttaacatttttgagctgcatttaagtagactttggaccgttaagctgggcaaaggaaatgacaaggggacggggtctgtgagagtcaattcaggggaaagatacaagattgatttgtaaaacccttgaaatgtagatttcttgtagatgtatccttcacgttgtaaatatgttttgtagagtgaagccatgggaagccatgtgtaacagagcttagacatccaaaactaatcaatgctgaggtggctaaatacctagccttttacatgtaaacctgtctgcaaaattagcttttttaaaaaaaaaaaaaaaaaaattgggggggttaatttatcattcagaaatcttgcattttcaaaaattcagtgcaagcgccaggcgatttgtgtctaaggatacgattttgaaccatatgggcagtgtacaaaatatgaaacaactgtttccacacttgcacctgatcaagagcagtgcttctccatttgttttgcagagaaatgtttttcatttcccgtgtgtttccatttccttctgaaattctgattttatccatttttttaaggctcctctttatctcctttcttaaggcactgttgctatggcacttttctataaccttttcattcctgtgtacagtagcttaaaattgcagtgattgagcataacctacttgtttgtataaattattgaaatccatttgcaccctgtaagaatggacttaaaagtactgctggacaggcatgtgtgctcaaagtacattgattgctcaaatataaggaaatggcccaatgaacgtggttgtgggaggggaaagaggaaacagagctagtcagatgtgaattgtatctgttgtaataaacatgttaaaacaaaaaaaaaaaaaaaagggcggcggctcgcgatcctagaactagcggacgcgtggg

SEQ ID NO: 85 - DNA, 1367 bp, Homo sapiens
  SITE (112): n equals a,t,g, or c
aatcatgagcctccagaagagacagatggcccaccaggagctgttgctctggttgccttcctgcaggccttggagaaggaggtcgccataatcgttgaccagagagcctggnaacttgcaccaraagattgttgaagatgctgttgagcaaggtgttctgaagacgcagatcccgatattaacttaccaaggtggatcagtggaagctgctcaggcattcctgtgcaaaaatggggacccgcagacacctagatttgaccacctggtggccatagagcgtgccggaagagctgctgatggcaattactacaatgcaaggaagatgaacatcaagcacttggttgaccccattgacgatctttttcttgctgcgaagaagattcctggaatctcatcaactggagtcggtgatggaggcaacgagcttgggatgggtaaagtcaaggaggctgtgaggaggcacatacggcacggggatgtcatcgcctgcgacgtggaggctgactttgccgtcattgctggtgtttctaactggggaggctatgccctggcctgcgcactctacatcctgtactcatgtgctgtccacagtcagtacctgaggaaagcagtcggaccctccagggcacctggagatcaggcctggactcaggccctcccgtcggtcattaaggaagaaaaaatgctgggcatcttggtgcagcacaaagtccggagtggcgtctcgggcatcgtgggcatggargtggatgggctgcccttccacaacamccacgccgagatgatccagaagctggtggacgtcaccacggcacaggtgtaaccgtccatgttccgtgtgagcagagtccctaccaacgggcaggtctgcatccggggagaatgcagctgcttctggcgacaatcctgctagtaaacactggtcttcggtgagcaacgaacactcgcctggcctgggaaactgcatgcccactttctgggaggggttagtgcaggtgccgtggacaaaggacaacatttctctggggctttttaacttttattcctaagactctaaaggcgttgatttcaaccctccttcactctggcttcttcaggcaacccacgtggtctcctgtgagaatcttctcgacagttacttatggggacacttgtgaacaattaactgccaggcagagcatgagaacaaacattcccaggccatgtaggataggatactccagactccagtcatcctcccccatccatggtttctgttactcatggtttcagttactcatagccaactgcagaccgaaaatactaaatgaaaaatttcagaaataaacaactcttaagttttaaaaaaaaaaaaaawwaaactcgta

SEQ ID NO: 86 - DNA, 1010 bp, Homo sapiens
tcgagttttttttttttttttttttttaagcatgtaataatgatttaatgtacattgtgcacaaatacaatatttaaaaaataaaaatagaaaatcaaaattcaaatacaaaagtaaactacattcatcactccaaaatatcttttaaggagaattgttaaaactgaccaaaagagtcaactaaagcctgaataaaattttgatgctactgttacattaataattgaacagcatttacaagaaaactatatactccacaaaatgtatgtgttcagtcttagtcacttatctgctcttaagacgtaaataaatgttcttaggggggaaaaccaattatccagtcctccccgcttccttatttgtctggttcccaccactatcctctccccgacctatacatacatacacacacacacacacacacacacacacacattctagcatgatattgtctatgtggtagagccttaaaaaatgttatttctttcagatatggtctacaaatagaaaaaataatattaatgagcattgtcaaaagttttacaatattttgagaaaatcacgcataaactattaagctgtatgttccattggaccacaactttatggttgagcattgttaaaacaaaacataactatagacatcattttctggatgactctcattcagaattgctggtattcctggctcttctttgggtttttctttcatttcttgaggaaaagtataagcatctttagcatcttcctggtgtgctttaggatcctggccttggggcccacctgtttcttggtgtggttctggaaagcattctttaggcacatccttatttttatatgtctcagtagagaggtcttcaggccccggtgtttcttggtatatttcaggtgaatattcttcaagctgggatgtttcttggtatatttcaggtgaatattcttcaagcccaggtatttcttgatacgtttcagttcggcacgagaattcggcacgagctcgtgccgaattc

SEQ ID NO: 87 - DNA, 1367 bp, Homo sapiens
aattccaaaacaaggtaaaaggaaccagaaaagaaaaaaaatgtaaataaagttataaaaataaagaattttttcaaggttaaaaagctgaaaaagaaataattttatataagaaagaattttatatggtaaatttagtcctaaaataaaataactggttgtttaacaaggagggatgttcaggacaaaccagaaagtccaagcatgtcatgaacattggtgtaagtcatgataagattttatatatatatatacacacacacacacacaccccaaaagcttttatataatcaagttgtcmtattattattaagttttggtttgcttagggaagaaagarctaatttttaaaaaatcaaggttattacatccatgtatcttcctgtgtatgcttttaaagtccttgtaacattgagttacagggctttaactcctgtgtctgaaaaatcacaaacactgatgacaatcaaagcctcatcttaaggccccgtagaagatgccaatcaaaataaactgcattcctgaggcactaggcaagaaattaaagctattcaactcctcaaggcccagggactattgcggaagaggtgggcgcgtaagattgtaagggccgattttgaaagatccagtaagttcagtttctctatgaactaatcattcaagtcaaaggcacactgatgcaaaatcagtatatggacccctgtgtctgattagcaaggttttcttgaagcattaaccaactccttcataaaggttataaaaggcttatggragttatattttataatcaagattaaatcttatagtttgtttacaaaattttgaaaatcaaatgtgattggcttcaggctgtttttattagggcttcttgtttagaaagttaagtcacctctctcaaagaatgaaggtttttgctttttttgaaatccttgaattatcacttggrttaaataaatgactttacgatgacctgtaattttattttgtaatgtcaagtgttttaaaccttttgtatttgacaagctttccaaaatcaaattataaattatgtatttttctaacctaattaatcctttaagatcttagtttccctaaagtcctaaaatgacataatttggcttatttggtataaaaattatataggaagcattgtcaaatgtgaaatggtgtttggttttctttgggctgtatttgtataaatatgttattggtgtatgttccaaaattatgtgaaactcctataattctaatataacttagtgtacattatcagtaataatcataattgttatattaaaattattgtgtgccacagaggtaaaaaaaaaggaattcgatatcaagcttatcgataccgtcgacctcga

SEQ ID NO: 88 - DNA, 1088 bp, Homo sapiens
gaattcggcacgagtgaaattttgtcgatttcaaaaatggaaaatacataatatgccaggcacttcctgggcaatacagatacctgcagtaatggagtgagcaccagcatcttccctgatggcgtgtgcagtgaggtgactcgtctgtagtgtcctcaaggtcacgtagagagcatacagtaaatacttgttgactctttcaaacttaagttaatgatacagtcaggactgatagccattttgttgtctttcttgaaagtttacgtggaaggcagaccttgtgtatgcttttcaaaggggctcmtttagcgcacttggcgcttaagaatttgagatcagtaagtgtgatggtcctaatctttttttaaaagtattggaagtttgaacycmcctgatggggttggttttttttttttttttttccaaaaaaataatcattcaaaataatcggttaacattttcaataagagcattacatacaaggagttagggaacaaagagttttaaaatctggctctttttatctctacttagggcgtgcatcttctcttcttaccccaacatatactgactttttaggacctcctttagggagatctcaatatcccgaatttttctgtgtggagaggggaaggaatatgtctttttttgctttggtcagagtggatacattttatagtttgttttttcaaagacgggtcttctgagtcasttctttcactgctgccgtaaagaaactgtataaaggtgattgagcagtgaaggcatggataaaaggggaaatattcagcagttctgaacgtgcatgtcatcaaatataaaggagtgagaacttgatgtataagaaaaaatggaagttaaaaaaaawaaaaatccaagaatgggctgcttgttgcagtagtgaactcctcgctggaggtactagagcggagtctgtctcaaggatgctattggaagcaccccagctgtgggtggaaaactgcactttctgagcctagtcttttatagcctggrgtttttgatgctgatgcttttactacttgttcttagactwttttgccatacgctgctctgttttctcacctcca

SEQ ID NO: 89 - DNA, 1861 bp, Homo sapiens
tttgcaatcctggaggagcccttgctggggctcggtccggcgggagcattgcagtggcggagccggcctgccacccgctcactcgccccaagtctgagaaataaatacattcatcactgcacaaacatattgatacaaaaacaacactgttaagagtgtttgcaccgtctatgttggtaaggaccagacccagtcagccccttccgctgcctggggtggggttagggggccccaggagtggggacccaccagagtcgacagagctgcgcaaaggtcccggctttttggcttgagtgggaccctcgcatcaacccatccccaagggtcacgggcagagcagcagggggacccaagcccagactcgggtcctgtggccagaactgacggccatccccgcgtaggctagctggtcaggaccagcatggtccggccagagggccttgggggctggtcagsacgggcccaagctytttggtgccagctgggcttggaggggccctgggaatggggacgagggctcaggtgactccagggaggcttccaatccctcccccagccccagggctacccttctctgcccstgagccactccagggccaactcagaagggtttccagcagcaggggagggttccctggactggccttacagctgctgaggtctgaaactgtaaaagcttatgtaaacaatgagataaatatattagcatcttttttctgagcccatggaggttccatactcattcaaaatgtgctttggtttaaaaaataggctttgtgaatttgggtatgagcttatttttttttcttttttctttgtttatcctctctttcctacatgatatctgctattttctgattcctgtttctctgaaacattcaggaattaagtgacgaacgcagagaactgtaagccgccttggcctccaataacccagtttccttgtgaggctcttaacatctccacacacacacactcgcacacacctgatgtggaaatcaaaggaaaaagaaaacaaagccaaatgttgtgttaatcccgccccgccccacaaacccttaaagtcttaaataggaaactagtgttctgctttctcattaaaacacagaaaaggctcgatacaatactaaggtggatacaatactatgtcgcacaaacgtcgttgagtgaggggcctctgctcccagtccctgaagttctgcaarggaatcacctactttcacgrgtcacctcacagatgcggctgccccacagcccgggaggccatgcacacggcccaggcgcgtgaacatttcccgtgcggtacagactttgtgtcatgtggcttaagtgctgatggggcggggtggcgtcaggacggcaggagccccctcactgagtatgggtgaagtccatgggtctcctccccccaggtccctagcctgacttgctggaacctgagacccagggtccagtcctctgtctcccaccaggagggaagaggggccatcttaggctgggatcaccacagggagggctcagccaggagcctcatctacccaagctccctcacccccaaaagacgccgctcaccacttgggtccctgaactcaggctctgtttttagctggagggtctctagaggggtgggggtaggggatgactctgtatttttttggtctaaacttaaaatagaatgaaaagagagagaaaaaaaaatggtgaagcaagatgacaataaagctgccagcccagccccacagcttcagctggctgaagacagtgggactgagatcagcaaccttggtctgaccttgagagtccacttcagggcccacagaagtatctgaggctggctaattaccaagatgaggggcagaga

SEQ ID NO: 90 - DNA, 1259 bp, Homo sapiens
aattcggcacgagctcgtggagagattgaagatggcggcttctcaggcggtggaggaaatgcggaccgcgtggttctgggggagtttggggttcgcaatgtccatactactgactttcccggtaactattccggttatgatgatgcctgggaccaggaccgcttcgagaagaatttccgtgtggatgtagtacacatggatgaaaactcactggagtttgacatggtgggaattgacgcagccattgccaatgcttttcgacgaattctgctagctgaggtgccaactatggctgtggagaaggtcctggtgtacaataatacatccattgttcaggatgagattcttgctcaccgtctggggctcattcccattcatgctgatccccgtctttttgagtatcggaaccaaggagatgaagaaggcacagagatagatactctacagtttcgtctccaggtcagatgcactcggaacccccatgctgctaaagattcctctgaccccaacgaactgtacgtgaaccacaaaggctgatctmtttccagagggcactatccgaccagtgcatgatgatatcctcatcgctcagctgcggcctggccaagaaattgacctgctcatgcactgtgtcaagggcattggcaaagatcatgccaagttttcaccagtggcaacagccagttacaggytcctgccagacatcaccctgcttgagcccgtggaaggggaggcagctgaggagttgagcaggtgyttctcamctggtgttattgaggtgcaggaagtccaaggtaaaaaggtggccagagttgccaacccccggctggataccttcagcagagaaatcttccggaatgagaagctaaagaaggttgtgaggcttgcccgggttcgagatcattatatcttctctgttgagtcaacgggggtgttgccaccagatgtgctggtgagtgaagccatcaaagtactgatggggaagtgccggcgcttcttggatgaactagatgcggttcagatggactgagcttggatgcttctgaggcaagctgaagctttgggttctgactgacccaccctacaggactgctgaacagagagcccagtgtgactagggatcctgagttttctgggacaattccagctttaatcaatacattttgttaaatgtgccataaaatgagactttttacgcctttataaggccttagatgtaaataaactcacccaaacaaaaaaaaaaaaaaaaaactcga

SEQ ID NO: 91 - DNA, 1566 bp, Homo sapiens
  SITE (22): n equals a,t,g, or c
  SITE (24): n equals a,t,g, or c
ctagaagagcaagcccgccagnantgatgaaaactgattttcctggagaccttggcagtcagcgacaagctattccaacaactaagagatcaggactccagtagcagtgagttctgcaccttctggtgacagtgagggtgatgaagaggagacgacacaagatgaagtctcttcccacacatcagaggaagatggaggggtggtcaaagtggagaaagagttagaaaatacagaacagcctgttggtgggaacgaagkgttagagcacgaggtcacagggaatttgaattctgaccccttgcttgaactctgccagtgtcccctctgccagctagactgcgggaccgggagcagttgattgctcacgtgtaccagcacactgcagcagtggtgagcgccaagagctacatgtgtcctgtctgtggccgggcccttagctccccggggtcattgggtcgccacctcttaatccactcggaggaccagcgatctaactgtgctgtgtgtggagcccggttcaccagccatgccacttttaacagtgagaaacttcctgaagtactaaatatggaatccctacccacagtccacaatgagggtccctccagtgctgaggggaaggatattgcctttagtcctccagtgtaccctgctggaattctgcttgtgtgcaacaactgtgctgcctaccgtaaamtgctggaagcccagactcccagtgtasgcaagtgggctctacgtcgacagaatgagcctttggaagtacggctgcagcggctggaacgagagcgcacggccaagaagagccggcgggacaatgagacccccgaggagcgggaggtgaggcgcatgagggaccgtgaagccaagcgcttgcagcgcatgcaggagacagacgagcagcgggcacgccggctgcagcgggatcgggaggccatgaggctgaagcgggccaatgaaaccccggaaaagcggcaggcccggctcatccgagagcgagaggccaagcggctcaagaggaggctggagaaaatggacatgatgttgcgagctcagtttggccaggacccttctgccatggcagccttagcagctgaaatgaacttcttccagctgcctgtaagtggggtggagttggacarccagcttctgggcaagatggcctttgaagagcagaacagcagytytctgcactgaaccacaccctcctgcctgccctccttcccacctacctacccacccacccacacccacagccacgaggaccagtgctgctgccacccacgaggccctgtccttgctgccagaggcaggcctgggtttattgcaggtggacctgagcagcccttgcatatgggaacaggatgatggggtcaggagggacctggctcaaggcagctctggacaagggagcaggcagtccagagaactggcctccccagcccactgccacaggctgtgcttctaggactgtgggcccctgtgtggcccatgaagttgtgaagtcaaataaattaattttatctttaaaaaaaaaaaaaaaaaayyggggggtttttttggggg

SEQ ID NO: 92 - DNA, 1593 bp, Homo sapiens
  SITE (1522): n equals a,t,g, or c
  SITE (1557): n equals a,t,g, or c
ggcacgagcctcggcctcggtggcggtggtggacacgtcgagccgggtagaagtggaggggccgttcgaagagtcgtgagggggtgacgggttaagattcggagagagaggtgctagtggctggacttgacctggaaagaatcttctgctgactctcaacttttcctggaaaaaatggatcattcccaccatatggggatgagctatatggactccaacagtaccatgcaaccttctcaccatcacccaaccacttcagcctcacactcccatggtggaggagacagcagcatgatgatgatgcctatgaccttctactttggctttaagaatgtggaactactgttttccggtttggtgatcaatacagctggagaaatggctggagcttttgtggcagtgtttttactagcaatgttctatgaaggactcaagatagcccgagagagcctgctgcgtaagtcacaagtcagcattcgctacaattccatgcctgtcccaggaccaaatggaaccatccttatggagacacacaaaactgttgggcaacagatgctgagctttcctcacctcctgcaaacagtgctgcacatcatccaggtggtcataagctacttcctcatgctcatcttcatgacctacaacgggtacctctgcattgcakkagcagcaggggccggtacaggatacttcctcttcagctggaagaaggcagtggtagtggatatcacagagcattgccattgacatcaaactctatggcgtggccttatcgattgcagtgggaagttgttgaagacttgaagacgtgattcctgctccaatcatcccttcttgctcctctttgkgcacgtacacacacacacacacacacacacacacacacccgtgytcaaacagaggtttagtttacagtctctgaactaaagtagtaacctcccaaattgttttttctaataagctgagattcccatttctcttaaggagaagccacccatgagatgtcttttccttctccatcatcttagagccaagttatatgttcttgtctaatccatgtagctttttgttcaatgacttgatcatctgcttcctttttgaatttttaacagatagtaagtaaatttggtggttttttcccctgggtcagtgatggaaaggggttaacttcagccaggattgatggcagctgagggaaattcttgcccaactaaacccagaactcaaacttaacattagaaaataaggtccagggccggacacagtggcccaagcaagtaatcccagcactttggggggccaaggcaggctggatcacctgaggacaggagttcgagaccagtctggccaacatggggaaaccccgtctctactaaaaatacataaattagccgggcatggtggtgggcgcctgtaatcccagctactcagaaggctgaggcaggagaatcacttgaacataggaggcggaggttgcagtgagccaagatggcgccattgcactccagcctgggtgacaagngtgaaactccatctcataaaaaaaaaaaaaaatantcgagggggggcccggacccaaaacgccggaaagtg

SEQ ID NO: 93 - DNA, 970 bp, Homo sapiens
ctcgtgccgaattcggcacgaggtgcccaggctctcagggcagagggtccagtgtgatcactttgcatggcctctctcccctcctgagcttgtgccagggccccagggctgacctggagaggaaaawggcagagggtgaagatggggtgtctggtttggggaccatcctggccccccttgtcactgttggcatctcttctgcacagtggcattgctgggaggtgcttactgtgcctattcaaggggctggcagccgcagcctcactgcagatcagggacttggcttcccggttgaccacaggtccaagaacctgcagggtccagcctcccccccatccccagtcttccccaccctggcccggccctccaggtgcagaaacatgcaggcccctctccaggactgtgggaggagtgtgtccctcagactggcctgtgtcctggctcctcttaccacctcttccagaggttgtcacctgcagctgccccaggataaaggcaaggccagagaggactcctgaactcctgtgtgcctggggtggcaggggcaaacatagccaactggtggcctgagcggggccatggtgargacacccttggtggcttgtcccacatcaagctgggargtgacactgaggatgcattagtctgcagcgtatgataaaaacggcatttcaggccaggcgtggtggctcatgcctgtcaccccagcaccttgggaggccgaggtgggcagatcacatgaggtcaggactttgagaccagcctggccaacatggtgaaaactcatctgtactaaaaaaacaaaaattatgtgggttggtggtgtgtgcctgtaatcccagctacttgggaggctgaggcaggagaatcacttgaacctgggaggcggaggctacaacgagccgagattgcaccactgcactccagcctgatccgtctcaaaaaaaaaaaaaaaaaaaaaaaaactcga

SEQ ID NO: 94 - DNA, 934 bp, Homo sapiens
tctctctctctctctctctctctgctgtaaagaactcccaaaactcaaatgtatcaggaaatgtaaaggttaagtctgactacaagaaggccaaaattgcaccagcttcctaagtgaagaataatagaataaaacatatagagggcagaaataaaatgaggtgtatctggagaatttcatgatgagcatttagatttagcaatgcccaatgtcatgctgacactgtttgtcatgaccttgtcttcagctagtaatttggggttgtacttttttaaatttaattttgaatgttcttgcatgtttggtacctctctcctcactgctaaagataaattgtttatctgtataacataactacaccaatgtcatttattgtatacgctagtacacaaatgtgtttttttattaagtaatgaartatttgctgtgaaaaatgtattatttgtgccaccgtttatatctgtgttcattttctgtgtgtatatgcgtgtgtattcgaatctcaatttttcttttactctagtttagattaagacatatttagatgaaattttaaaaataacattggaaataggaggctaagttttgttsagtctcattcccttggggggaaattgcttttgccattttattttcatgtacaataacctaaaaaggatctcctactgacttccttcctaattattattgttttacacgaaagaaaggaaatacgttttcaattgagttgtttgaaatcattcactttgtgtagatttcccagactgatgtttcattgtaagaatattacattatagacaggttggccatttcacaagcaactaatccatagttttggaagcccgctttaagagacctgaatatctttgtttttaataaaatacttagagtttaaaaaaaaaaaaaaaaaaaaaaaaaaaaaaaaaaaggtaaa

SEQ ID NO: 95 - DNA, 1392 bp, Homo sapiens
  SITE (129): n equals a,t,g, or c
  SITE (149): n equals a,t,g, or c
  SITE (339): n equals a,t,g, or c
cagctcagctctgcgctgctgcacgccaaccacacactcagcaccattgaccacctggtgttggagacggtggagaggctgggcgaggcggtgaggacagagctgaccaccctggaggaggtgctcganccgcgcacggagctggtggntgccgcccgaggggctcgacggcaggcggaggctgcggcccagcagctgcaggggctggccttctggcagggagtgcscctgagccccctgcaggtggctgaaaatgtgtcctttgtggaggagtacaggtggctggcctaygtcctcctgctgctcctggagctgctggtctgcctcttcaccctcctnggcctggcgaacagagcaagtggctggtgatcgtgatgacagtcatgagtctcctggttctcgtcctgagctggggctccatgggcctggaggcagccacggccgtgggcctcagtgacttctgctccaatccagacccttatgttctgaacctgacccaggaggagacagggctcagctcagacatcctgagctattatctcctctgcaaccgggccgtctccaaccccttccaacagaggctgactctgtcccagcgagctctggccaacatccactcccagctgctgggcctggagcgagaagctgtgcctcagttcccttcagcgcagaagcctctgctgtccttggaggagactctgaatgtgacagaaggaaatttccaccagttggtggcactgctacactgccgcagcctgcacaaggactatggtgcagccctgcggggcctgtgcgaaracgscctggaaggcctgctcttcctgctgctcttctccctgctgtctgcaggagcgctggccastgccctmtgcakcctgccccgagcstgggccctcttcccacccaggaatccaagcgctttgtgcagtggcagtcgtctatctgagcccctcctcccggctggactggagcctggctcccctcttcgttccttccctggctgccggagagaccccactaacccagcctgcctgggctctgaccactaacactcttggccatggacagcctgcacaggaccgcctccctgctcttggccactgtgctcccatttctgtccttggccttgggagtagctgagggggcagactagggagtagggctggcaggggagggggcagacagcctcgcctcgcacccttcatccctggctgccggtcccatccttggagggactaagctgggggtgggacatgagtccccctgctgcccctgccacatcccagtgggctctgaccccctgatctcaactcgtggcactaacttggaaaagggttgatttaaaataaaagggaagactattttacaaaaaaaaaaaaaaaaaaaactcga

SEQ ID NO: 96 - DNA, 1963 bp, Homo sapiens
  SITE (5): n equals a,t,g, or c
  SITE (1116): n equals a,t,g, or c
  SITE (1253): n equals a,t,g, or c
ggtanctgcagtacggtccgattcccgggtcgacccacgcgtccggagaaatgcaaattaaaacagtaaagtgtcattttcacttcctggattggcaaagggttttatgtattttactgacagtgctcaacattagcagtaaacaacaaatggtgagtaaatatgagcttcggaacctcagggaaatgatctccttatttcaacctgcagattccttcctacaaccagtgtagagcagagtaccaggacgggccattgagcaccctggtgttgagatcaagtggcctctagtcagagttgggtcagggccactgtgagtgggctgcccccaacatgagtcagctgtctaggactagtttatctctgcttctcactttactggtattatggggcagctcctgctgtcttccaatttggtgtcttccaaatcggcaccgtcttttaaagttgagtttcttgttattctcacctgatataccttatttatcccacacccaccccaataacatatcgtgctcagtgttatctttgagacaacacttgaattttactcagcctggagcgctcttcacatgtcttgtccagatccagttcggactcattcttcagccgtgcatcagtaaatgggggctaggttaaactgtggtgacaaacaacctccaaatttcagtggctcaaaaatcttcttcctcatttatwtacatttcatcatgggtcaggtgagaggtagctctgtgctgtgtcatcctaacacaggaatccagacggaaggagggacaatcaataagatccccattgctatagaaaagaraaaaaagtatgcggaatarcactcygtttcytggagawtyctcctgaaaaagtcacatgttatttcttctcacctccattggcaaaaaaaaagtcatgtggccatgtgaaaatgtaagtaggcgggatggaacagtcagaatgcattcataaaatatgaactgaaaatatctggagaacakcacctatgactaccacgaatgccaacatgcatccctaacaacccagtgctgtcaccctccaaactttttatgtcttgcaaagtattagaacttcttatctgaagccataccactcagagggaangcaaaatacatattgacatctcctttaggatgtccttagagaattcaaggaaaagaagttaaataattttaaagtgcttttgggtacagctatttagcactagagggtaagattagacatagattgtaaagataatnatagggttagggataggattaggatctgggtcagagtcaggsccagaagtatggttagaggtggggtcatggtcagggtsgagatcaaagtcagggtcaaagtaagggtcagaattagggacccaggatagggatcaggatttaggttcagtgtcaaagtcttgggacaaggttagggttagaattagaaccagagctttgttctcctcaggacccacccgagggtgggtcaccatggctttggagcgcctggtagtgtggtgtgtccacagkgaagaccagagtttcattgtccttaagactgacytggggagatgtggctgtagsccattgaggaaggtgaggcaacagcttcctgtctgctyccccgtgtgctgaggagggagttctgccatgggctttactttcacatgttatattccacaagtcttgttttacaaaagcatcccttccttgaggcttcggctgctcatcgctgctcatcatmatagcgtgccataacatatagtaagatttgggtttgtttctggggagatatcttggtatagagaaaggagaaatgcttagagccaccatcaggacagttgggatgaaagttgggtataggcagaggctggaggaaacatgtgcatcccctgtaaacacttttattcatgttttaattactcatttttcttacagtgttaaattagtaaagatagtattgaaaa

SEQ ID NO: 97 - DNA, 1220 bp, Homo sapiens
  SITE (341): n equals a,t,g, or c
catgaatggctcgcacaaggaccccctcctcccctttcctgcttctgcgagaactccctccctccctccagctccgccagcccaggcgccccttccctggaagccgagcggcttcgctcgcatttcaccgccgccgcctctcgcaatattgcaatataggggaaaagcagaccatggtgaatccgggcagcagctcgcagccgcccccggtgacggccggctccctctcctggaagcggtgcgcaggctgcgggggcaagattgcggaccgctttctgctctatgccatggacagctattggcacagccggtgcctcaagtgctcctgctgccaggcgcantgggcgacatcggcacgtcctgttacaccaaaagtggcatgatcctttgcagaaatgactacattaggttatttggaaatagcggtgcttgcagcgcttgcggacagtcgattcctgcgagtgaactcgtcatgagggcgcaaggcaatgtgtatcatcttaagtgttttacatgctctacctgccggaatcgcctggtcccgggagatcggtttcactacatcaatggcagtttattttgtgaacatgatagacctacagctctcatcaatggccatttgaattcacttcaragcaatccactactgccagaccagaaggtctgctaaaaggtcagagtaatgcagaatgcgtgccttcatctcagatttgttcatcacaggtggatcccatgtktcttcagtagacaagtcacctttgtagctagcaccagtgccagctccatgccattgcaccttctttagtcttgattgcccttcccgcatttwttggtgtattaaaatgactratkaagctaattaaaagaagcattcaaatctgctttctaccctcattaacaattagcagggcactggccagagtttgtaccctgtgttttaccttaacaacattctatttgctctttgtatatttaagtgttgtaaggaaacgtgtttcaatcaaaactgaccatgagataaaggaaagagatgtggcttttgtgatattctatcacaaacacttattgtatctctgtaaaatacaatgtatgtatgcatgtaagtgtttttgtcctaatgttgctactcccatggcaaagaaaaaaaaaagaatgaaaaaaaraaaaaaaaaaaaaaaaaaaaaaaaaaactcgagggggggcccgtacccaatcgccct

SEQ ID NO: 98 - DNA, 864 bp, Homo sapiens
  SITE (23): n equals a,t,g, or c
gggttttttgtttttgttttttnaggggggagggggggtttcccctcctttgccccagacttctctttgaacacaaatgcattagccttgtggctagaamaccctcttcctacctctgtctcccctcacttgtcatatgctctgacatgctaacatttcttttgttcatccctgttgcccccacagaaacatcccagaaaaaccggtcagtgttccttcctccctgatccttaggtttctgaaatagggttctgttacatcctcttcgatagcctgtttaaaatgtttagaaggtctggagctcaaaaatgcgttcttccacattgataatttagtaaactgagaacattgacatcactacagggcagcataagaggttgcttacatgtggtagcagctctggtttgattcaagttgctaccatgtacattgacagcacatataccataaccagcgtgttgggttgaattgcactttctacctttgtatgagatttacagactttccttctgggtttgtatcatgaccagaggggtactatagggttggtttatactgcaatatagaggatcagaagccatttgatttggtaggtgtgtcagaagggagaatgatggcagacgaactgctggaagaggtcagaagatagccatgctaaaatgcaattatatcctcatgtttatcccaaactaatcttggacttttccactcattagctttgttttgcccttgtttcccttgaaggtttaagttcaaccatattctgtcaactgttcagtttcagtggaatcttgtatttctggttcattataacaaattgttcgcttaaaaaaaaaaaaaaaaaggggcggccgctctagaggg

SEQ ID NO: 99 - DNA, 1052 bp, Homo sapiens
tcattaacttcagacaacatcataaagcaatgatagctcttttctttgtgaccacaaycttaacttgagctttgctgggtgttttgcacataacaatgagggactattagacataacataattttcataggtcattgccctgtcaatgatagagaagataattgcmagakagttwatttctggtgtgtgtatatgtgcacaaatgtgcagggcctctactttgcaactggaatttatagactaatgataaaatatatccctttaaatatacaaatgacaattgacttcaaactttcccaagcccacatagaaattccctgaaaacatataaaatattgagttcttcaacctcagcactattgacattttggaccaratagttctgtwtgtkaaaggckgtctttgcactgtagaatgtttagcaatattccaggcctctatccacctgataccgggcctgtatccccctgatactggtagttcttttttcccccatcacaaattgtgacaacccagaaatatctccttatacctttccagaatgttttccctgggggacaaaaagcactcccattgaaaaatccactggtcccaaatggttaaaaattggttcccttcccattccttttaccaggtttggggccaagcccccttcccttaatttccctcccgaaatgaactgaaacccaactgtwactcttaatgaaatattgaaggkttgaagctttaaaaaaaaaaaaaaaaktacagcttggctgggtgcagtggctcaagcctgtaatcctagcactttcggaggccaaggtgggcagattgcctgagctcaggagttcgacaccagcgtgggcaacatggtgaaactctgtctctactaaaatacaaaaagttaacctggcatggtggcaggtgcctgtagtcccagctactagggaggctgaggcaggagaattgcttgaacccaggaggcagaggttgcagtgagccaagattgccactgcactccagcctgggcaacatagcaagactctgtcaaaaaaaaaaaaaaaactcga

SEQ ID NO: 100 - DNA, 1309 bp, Homo sapiens
  SITE (85): n equals a,t,g, or c
ggcacagactttaagaaatgccaaatgcaaggaccattaagaaaattctccccgaaatgaggctcctctaacaaatgatgattanaacgctctctccttgagcagtcacattctagaaacacgacattccatgaggcaggaagagttcagttaatttgctcckgaaaaagtgtggttcagtgtttgtgtggcaatgtacgtgggcagaagaggccgctcaagctgtgtcccccctgagcaggattcaggaaagggaaaagaagttctcttcaactcagccaaggggccgtacgatggccgatgagattatgtatttaaaagttctttgtaaagtgtaaactaaaaaccttaaatgtaagatgctgttgttattattactgttgttgttgctgttatggacatgccaaaaggcccttgttagaagacagttttgccttttcaatctcatagcaaggaactcaagtctgatgcttcaaaaagatgagaagaagggcaagaagagggataactcccaagctcagagggaaaaaaaaggtgggggaaaagagccccagggtgaccttcaggaaaggccaggaccaggatgatctaacctttcccttcaccagaaacaaagctattgccagactgaaccctaaagtcaagcagtcacccactgcctttgctgggagcagaagcccatagcaacaagtgacctgcccctcagactcaagatcccagataccagagctggaggagtcatagggcattactggtaggcaggaaaactgagggtcgaacaaatggaagaatgcggtgatcatagaccaaagacacacagataattaaccccatgtgtccacccaggccaaagttcttcctgctaccccacagtggatgtccaggcagatggtccccacatgatggggaagcagagggcatagtgtggttttgtgggacttgttcatgttttgtagtgtgggctcaacagtgccaaaggaaacactagggaaaagttggtgaaacatgccagctagcaggaccagtaaaggcataatcaggcatttggcaaagcttgcttttctaattcaatgataggttctaataggaaatttttgaagattttttaaaacaatgttatagtggcacttccccagtatggaataaataacatgcattcttttttcaatatactgtcatattcagatgtcattaaaataaatggatgagtcacagaggagctatcagatgctctcatgactaccataactcaaaaaaaaaaaaaaaaawaaaaggggggcccgtacccatttgccctaaagggatcgta

SEQ ID NO: 101 - DNA, 929 bp, Homo sapiens
  SITE (923): n equals a,t,g, or c
atccatcacagcctttctatctaggccacactataaaatctggagaccttgaatatgtgggtatggaaggaggaattgtcttaagtgtagaatcaatgaaaagacttaacagccttctcaatatcccagaaaagtgtcctgaacagggagggatgatttggaagatatctgaagataaacagctagcagtttgcctgaaatatgctggagtatttgcagaaaatgcagaagatgctgatggaaaagatgtatttaataccaaatctgttgggctttctattaaagaggcaatgacttatcaccccaaccaggtagtagaaggctgttgttcagatatggctgttacttttaatggactgactccaaatcagatgcatgtgatgatgtatggggtataccgccttagggcatttgggcatattttcaatgatgcattggttttcttacctccaaatggttctgacaatgactgagaagtggtagaaaagcgtgaatatgatctttgtataggacgtgtgttgtcattatttgtagtagtaactacatatccaatacagctgtatgtttctttttcttttctaatttggtggcactggtataaccacacattaaagtcagtagtacatttttaaatgagggtggtttttttctttaaaacacatgaacattgtaaatgtgttggaaagaagtgttttaagaataataattttgcaaataaactattaataaatattatatgtgataaattctaaattatgaacattagaaatctgtggggcacatatttttgctgattggttaaaaaattttaacaggtctttagcgttctaagatatgcaaatgatatctctagttgtgaatttgtgattaaagtaaaacttttagctgtgtgttccctttacttctgatactgatttatgttntaaccg

SEQ ID NO: 102 - DNA, 775 bp, Homo sapiens
  SITE (10): n equals a,t,g, or c
gaactagtgnatcccccgggctgcaggaattcggcacgagcccracccscaccaccaccagaatgcagttccagcttaggaagccacaaacaagccacccaggaggaacaaaacaccgccagcgtggattttcccaaatttccctggaaagtaagtctcgctcttgccaaagaaaagtctggcttggagagtctctggagcccaggatgccagcatgtgccaatgactgtcaccttcatctcttcaaaagaaaagccatagccgaggactgtcccgcgacccccgtggactgcgtctaggtcatgtgattctgttttcatttctcatcccatccaatttgtccttttctcctgtcattttcttcctctgtggtcccttcaaagttgttataatttgtactgaacttcaaaatgtgtcccgttctccccagaccactctagccacagtatattgcaataaaattacttcttatatttgcagaaattcttttggtgtaattttattttttcctctcaatatatataattggacaaacgctggcaaaaagaaaaaaatggtaagcaaaaaacccaagataaagtttcgaggacatcaggccttttgaaatacaatgtcaaatgacacattgtacgktttcaaaaaatccgctagacatgtcataagttttaactgtaatgcccaggaaaggatatcttaaaatattctaaacttgtgtaacaaaggaataattaactgtaatagtttttcaataaatcgagttgggtgtttccaccgt

SEQ ID NO: 103 - DNA, 359 bp, Homo sapiens
  SITE (3): n equals a,t,g, or c
  SITE (7): n equals a,t,g, or c
  SITE (15): n equals a,t,g, or c
  SITE (342): n equals a,t,g, or c
atnggantccccccnggctgcaggaaattccccgggctgcatgtctagttccagtctgcactggaaagaattcaaatatgcacctggctcccttcactattttgccctatcctttgtgctcattcttactgaaatctgtcttgtcagctcaggaatgggattcccccaggaaggaaagcacttttctgttctgggaagcccagactgttcactttggggcagggacgaacatgtgcctcgtgaatttgcttgaaaacagtcaccatcttctacccccatcactgtatagtgaaaaacctgattaaagtggtatctgagaaccawaaaaaaaaaaaaaaaaanctcgagggggggcccgg

SEQ ID NO: 104 - DNA, 952 bp, Homo sapiens
  SITE (276): n equals a,t,g, or c
  SITE (404): n equals a,t,g, or c
  SITE (724): n equals a,t,g, or c
gaattccccgggggatcagggcagccggggaggtggccaggccagtggcaggcctgtggagacaatccctyaggactagggacagggctgtgccggcctgggccagggcccacggacccgcagctcagggcgcctgcccacgtcgtctgccggcggtgcgccgcgggcgtccctcgcgtctcttcactgcacattgcaatgcatttgcgattcccatttctctgctaggagccagcctgggttggcgctgctcccagagcccgtgggtcccaagancttgcgttcccttttgttcctgtcccgtttatcaagaacacgggccccacctgttcacgttgcccgaaggccaccccaagcccaascctgcgggggcgttcccmmaytgccytgraatgcccggcttnaagttyttgcgcaacgcmaggaattcagtgtggggacggcccctgccggattaggcytagccctggcccaggtggtgagcggtttgcagtgtccgttctcatccacctgatgggcccagataaaggcccccgctgtccagcctccctggacggccctcgcggtccctgcagcccaagatgggactcagaccctgtgccccagagctcccctgccgcagaatggggccccagccggccccgaccgggtccaggagcactgctcgcctgtacatactgttgccctagcccacctggtgccgtgggagccacccccaggtgcntggcacagcccctccccactccgccacgcccccacccaccccgcgtgtttctgccctgtgactcctggaacctgcgtcctccccaaagccatgggaggggtgtcctcctcagaccatgcccccagatgatttttttaaataaagaaacaaatgcacctgcaaaamaaaaaaaaaaaaaaaaaactcgagggggggcccggtacccaattcgccctatagtgagcgatt

SEQ ID NO: 105 - DNA, 1545 bp, Homo sapiens
  SITE (1091): n equals a,t,g, or c
gaaagacaaaaggaaatagaagaaagggaaaaaaggcgtaaagacagacatgaagcaagtgggtttgcaaggagaccgagatctccaaccggacctagcacggtggcgcacaagatcatgcagaagtacggcttccgggagggccagggtctggggaagcatgagcagggcctgagcactgccttgtcagtggagaagaccagcaagcgtggcggcaagatcatcgtgggcgacgccacagagaaaggtgtgtccccagggaagcgtgtgactagagggaaaggactggccccatccatatcagacatggccagtcttgatcctcatgtgtcagcagggggacaatgaggcgtgtggccagagggagagggctggccctgccatcactagaacacaggccgtcctgttcatatgatgcactgccacttccgttttgtgaaaccaggaatcctgaggctcatctttattttttcagaacagacgtagagagatgaaggcttgtggaggaaaagatggtgagagacttgggcagaaaatgagtagtcctcaggaagaaatcttggttatgtgtttagagcatgaaggacagagccatatagtgtggcagtgaatatacctgctatctccatctcagaggtcgtctctacttttcccttttgccctttcagtatagatgtgatttctgattctcttacagattgtttgctttgcgagatctgatgttatgttgcagtctcttggtaaatgatgcctagttggtgttttattttcatttaatttttacagtctgttctgtgttgagggaattcaggaaagagacaaacatatgttagcattttaatcagggaattaagtttgagtcagcctagctgaacttcctttgctaaagaaagaagaaaacttttctggcagccccgttcatgcacagcttaggatacatcacgagcctgacagatgcatccaagaagtcagattcaaatccgctgactgaaatacttaagtgtcctactaaagtggtcttactaaggaacatggttggtgcgggagaggtggatgaagacttgggaagttgaaaccaaggaagaatgtgnaaaaatatggcaaagttggaaaatgtgtgatatttgaaattcctggtgcccctgatgatgaagcagtacggatatttttagaatttgagagagttgaatcagcaattaaagcggttgttgacttgaatgggaggtattttggtggacgggtggtaaaagcatgtttctacaatttggacaaattcagggtcttggatttggcagaacaagtttgattttaagaactagagcacgagtcatctccggtgatccttaaatgaactgcaggctgagaaaagaaggaaaaaggtcacagcctccatggctgttgcataccaagactcttggaaggacttctaagatatatgttgattgatcccttttttattttgtggttttttaatatagtataaaaatccttttaaaaaaacaamaaaaaaaaaaaaaactcgagggggggcccggtacccaattt

SEQ ID NO: 106 - DNA, 1322 bp, Homo sapiens
  SITE (82): n equals a,t,g, or c
  SITE (1320): n equals a,t,g, or c
  SITE (1321): n equals a,t,g, or c
  SITE (1322): n equals a,t,g, or c
cttctgggagcgaccgctccgctcgtctcgttggttccggaggtcgctgcggcggtgggaaatgctggcgcgcgcggcgcgnggcactggggcccttttgctgaggggctctctactggcttctggccgcgctccgcscgcgcctcctctggattgccccgaaacaccgtggtactgttcgtgccgcagcaggaggcctgggtggtggagcgaatgggccgattccaccggatcctggagcctggtttgaacatcctcatccctgtgttagaccggatccgatatgtgcagagtctcaaggaaattgtcatcaacgtgcctgagcagtcggctgtgactctcgacaatgtaactctgcaaatcgatggagtcctttacctgcgcatcatggacccttacaaggcaagctacggtgtggaggaccctgagtatgccgtcacccagctagctcaaacaaccatgagatcagagctcggcaaactctctctggacaaagtcttccgggaacgggagtccctgaatgccagcattgtggatgccatcaaccaagctgctgactgctggggtatccgctgcctccgttatgagatcaaggatatccatgtgccaccccgggtgaaagagtctatgcagatgcaggtggaggcagagcggcggaaacgggccacagttctagagtctgaggggacccgagagtcggccatcaatgtggcagaagggaagaaacaggcccagatcctggcctccgaagcagaaaaggctgaacagataaatcaggcagcaggagaggccagtgcagttctggcgaaggccaaggctaaagctgaagctattcgaatcctggctgcagctctgacacaacataatggagatgcagcagcttcactgactgtggccgagcagtatgtcagcgcgttctccaaactggccaaggactccaacactatcctactgccctccaaccctggcgatgtcaccagcatggtggctcaggccatgggtgtatatggagccctcaccaaagccccagtgccagggactccagactcactctccagtgggagcagcagagatgtccagggtacagatgcaagtcttgatgaggaacttgatcgagtcaagatgagttagtggagctgggcttggccagggagtctggggacaaggaagcagattttcctgattctggctctagcttccctgccaagattttggtttttatttttttatttgaactttagtcgtgtaataaactcaccagtggcaaaccaaaaaaaaaaaaaaaaaaaaaaaaaaaaaaaaaaaaaaaaaaaaaaaaannn

SEQ ID NO: 107 - DNA, 276 bp, Homo sapiens
  SITE (1): n equals a,t,g, or c
  SITE (2): n equals a,t,g, or c
nnatagctcaaccatgttccaggagtgtattccaatcagcttgttttttcttaactggttaaaggaatgttgctcattcacctgccccaactcacatattaacaattgtttaactgggattagataaaaggaaagctgacttacagatgaaccaagagggagctatttatgccacagcccccagcccagtaactttatgtttctgatctcctgcaaaatttttttataaaaaaagcttagccaggaactagtagaaagaataaagtaaagatggtg

SEQ ID NO: 108 - DNA, 381 bp, Homo sapiens
gattaaggtagaaaagtacagaaaacactaaattttcattgtgctgtttcaatgtggcagattctttaaaatacttcgacacgctacaataattaaaggttttaagaacattaagatacttaaaaaataaaagcccacaattgaataacaaaaatgaactttgttttattttttattggcattaatgtaggttgccgtggtgaaaatagtttgaaatacttcacagtaacagttttktgcagccctagagattaaaaacagcaaagtaaataagcaggactctcaacgactcatactcacagactgtttaatgtwatcctarcacttcsggargctgargcgggaggattacttgagcctaggatttgagaccagcctggg

SEQ ID NO: 109 - DNA, 638 bp, Homo sapiens
  SITE (590): n equals a,t,g, or c
  SITE (599): n equals a,t,g, or c
tgtggaaaacagtaggaaagcaatgaaagaagctggtaagggaggcgtcgctgattccagagagctaaagccgatggtaggtggagatgargargtggccgccctccaagaatttcactttcacttcctctctctctctgtcttcactgactgcacttcttcaggagaagcttttgttatctgtatcacgcagacatgctgctctttctgtttgtgtgcttacccatcacttggatggcagaattcttgtcacaactgagacacctyctataaaagtaagctgaaaggaacagcatcctcgtcagtgctcggcaggggcgggtaggggatgatggttttttccctaaggtaaaactgctgttgctcttgtttcctttttaactgtcagtgtttggctttcatcagactgaacattttggtgtacacttgaactgacggtttgatttttatcattttggaaggtgatcatagcaattcctttcaacttgctaaaattcatactcccccttttaaaagtatggttctgcttacattgctgtccttttcccttggctgactttttcttctgttgcctaggttgtacttttttnttttttttntttttcagtagcaaacaaggctgttttcatcaataccca

SEQ ID NO: 110 - DNA, 2246 bp, Homo sapiens
ggcacgaggccgggggagagtcacgcaaatgacttggagtgttcaggaaaaggaaaatgcaccacgaagccgtcagaggcaactttttcctgtacctgtgaggagcagtacgtgggtactttctgtgaagaatacgatgcttgccagaggaaaccttgccaaaacaacgcgagctgtattgatgcaaatgaaaagcaagatgggagcaatttcacctgtgtttgccttcctggttatactggagagctttgccagtccaagattgattactgcatcctagacccatgcagaaatggagcaacatgcatttccagtctcagtggattcacctgccagtgtccagaaggatacttcggatctgcttgtgaagaaaaggtggacccctgcgcctcgtctccgtgccagaacaacggcacctgctatgtggacggggtacactttacctgcaactgcagcccgggcttcacagggccgacctgtgcccagcttattgacttctgtgccctcagcccctgtgctcatggcacgtgccgcagcgtgggcaccagctacaaatgcctctgtgatccaggttaccatggcctctactgtgaggaggaatataatgagtgcctctccgctccatgcctgaatgcagccacctgcagggacctcgttaatggctatgagtgtgtgtgcctggcagaatacaaaggaacacactgtgaattgtacaaggatccctgcgctaacgtcagctgtctgaacggagccacctgtgacagcgacggcctgaatggcacgtgcatctgtgcacccgggtttacaggtgaagagtgcgacattgacataaatgaatgtgacagtaacccctgccaccatggtgggagctgcctggaccagcccaatggttataactgccactgcccgcatggttgggtgggagcaaactgtgagatccacctccaatggaagtccgggcacatggcggagagcctcaccaacatgccacggcactccctctacatcatcattggagccctctgcgtggccttcatccttatgctgatcatcctgatcgtggggatttgccgcatcagccgcattgaataccagggttcttccaggccagcctatgaggagttctacaactgccgcagcatcgacagcgagttcagcaatgccattgcatccatccggcatgccaggtttggaaagaaatcccggcctgcaatgtatgatgtgagccccatcgcctatgaagattacagtcctgatgacaaacccttggtcacactgattaaaactaaagatttgtaatctttttttggattatttttcaaaaagatgagatactacactcatttaaatatttttaaggaaawtaaaaagcttaagaaatttaaaatgctagctgctcaagrgttttcagtagaatatttaagaactaattttctgcagcttttagtttggaaaaaatattttaaaaacaaaatttgtgaaacctatagacgatgttttaatgtaccttcagctctctaaactgtgtgcttctactagtgtgtgctcttttcactgtagacactatcacgagacccagattaatttctgtggttgttacagaataagtctaatcaaggagaagtttctgtttgacgtttgagtgccggctttctgagtagagttaggaaaaccacgtaacgtagcatatgatgtataatagagtatacccgttacttaaaaagaagtctgaaatgttcgttttgtggaaaagaaactagttaaatttactattcctaacccgaatgaaattagcctttgccttattctgtgcatgggtaagtaacttatttctgcactgttttgttgaactttgtggaaacattctttcgagtttgtttttgtcattttcgtaacagtcgtcgaactaggcctcaaaaacatacgtaacgaaaaggcctagcgaggcaaattctgattgatttgaatctatatttttctttaaaaagtcaagggttctatattgtgagtaaattaaatttacatttgagttgtttgttgctaagaggtagtaaatgtaagagagtactggttccttcagtagtgagtatttctcatagtgcagctttatttatctccaggatgtttttgtggctgtatttgattgatatgtgcttcttctgattcttgctaatttccaaccatattgaataaatgtgatcaagtcaaaaaaaaaaaaaaaaaaaaaattactcggtcgcaaggga

SEQ ID NO: 111 - DNA, 1105 bp, Homo sapiens
gaattcggcagagcccacttagaggagctaaaatagctaaaggttacatgctttgcctcaaataatagacttagtgaagagggtagaagtagaaatraggtcagccccccagagcagtctggtggccttragcaaccaggaaggtaaagccggtacctcagttaaatcaccaagtttactggaagtgcatatttttcatgtgccaaattcagtaagtcatggagcaaatgtttattttgctatgctttaaaaagttgcttgcttcttgtaagttttctcagtggaagggttccaagttatgacttaatctatgtttgcagcattgcactggaaacaggatttgtctgtgaaatggctctgtcatttgtggaccacttctgtagggagattgtggatttaggaagggcagaagcaacagcagatatgcctggtgtttgaatggatgtgcctctytcggaggcagcaagcagcatacccatattataaagtttttgattttctaacatctgaagacaggcatccagccttgcagaacagccaggtgtctgttctatagactacagttccttgtttccagaattacggtaaccaaataatacacaaggtcacctgattgcacttcccaacaacctgaacaaagagcacctttgcgcttgctggtaggtgctgtaccagactctttgtaatctgccttagktcagrgaagaacaagccattaccagtatgggagtccatccytagtcagggctagttgctattatcccttgaatactctgcaggcatcccacaagacatttgagacttcatatttgtcaaataatagaaatstggctggcctagtggctcatgcctgtaatcctaaccctttgggaggctgatgtgggcagattgcttgaggccaggagtttgagacccacctgggcaacacagtgacatgttgtctctacaaaaaatttaaaaattaactaggcatggtagtgtgcctatagtcccagctactccagaggctgaggcaggaagatcccttgagcccagtaattcaaggctacagttagctctgatcctgccactgcactcctgtcttggtaaaggagctaaacccagt

SEQ ID NO: 112 - DNA, 754 bp, Homo sapiens
  SITE (678): n equals a,t,g, or c
  SITE (699): n equals a,t,g, or c
  SITE (725): n equals a,t,g, or c
aattcggcacgagaccaattgtacttttattatatcaggctgattcactgtttctaatgcaatgaacttgacacagattttaaatttttyctcaatctgtcccattgtgtagacaaattaattcaaagttctttttcttccttctctttttcatctaagcctgtgcttatgagtagaaaaagagaagaggctaccttgaaatgcctcgggcccaaactcagaaggctctgcactcaactgagcctcccttcctactaagaatggaatagtgttgcttataggggtgttggtccaagtatcagctgtggatgattaattcccagggctgctatcacctaaggtaacttcagtaatcttatgtgtttggaaaggaggatgaggattatttttcaaatacataattttgttttattttgaaacaatctcacacctacagaaaagttgcaattataatacaaagagcttccccctcgcctgaactgtttgatagtaagtttgccaaactgatatacccacgatccccaaatgcttcagtgttatttcctcccagccaaggacattctccctgcataacccacaatacaacccataaaagtcaggaaaatttaacacccagttccatttttgaacccatcctgaaattccaggtgttcattccatgtttttggccagttggtncctttggtatgttccctcccntagcccaaaaaaaaaaaaaaaaaacnccaagggggggggccccggtccccaatcc

SEQ ID NO: 113 - DNA, 1885 bp, Homo sapiens
  SITE (42): n equals a,t,g, or c
  SITE (543): n equals a,t,g, or c
atgccargaagactgatggagcaggcttgcaatattaaagtnccaaccaagaagctgaagaaatwtgagaaagaatatccagacaatgcgagagagtcagctgcaacaggaagacccaatggatagatacaagtttgtatatttgtaggtaactccagctgttgcatttatactgggaatcttcataagaagctgagagaaagagaggggaaaaagaaagtggctttctactttcaaaaatgaaacaaaaaggaaaaatggcaaagtactgttttagctgtgcatgtcatatccacaaagacttttagcaggtgaactgttccaagactgacacaaggatgtttcaaacttgcctctgtctgtagaaaatgttaaaaataccaactcacttggaaggaaaaataaaaatcacaaaggtatattgagcacagtagtggtgtttgttgcaacatttatttccacaaatgaatttatgaacaacagtgatatttgacttaaagtatgaagtttcagaatcaaaataatttcattttaatacgttcngttaattgtgaatctcttcmatggtaattagcaacactgttcccaggatgcaaagttgggaaacacttatttccaacttatttttttccaagtaaaatattatctctcttcaacatgctttaacttttcagactcacacagatacgtwacagctcccttctccctccatatcaatacactaagataaaagaatactgtattttcagcactgagcagcagtgccaaaatctcctgccaagaaatggactgtgtggcattattaattaaatcacccacattgggatgacttccacttttgtaactagagttatctttatgtggtcagagctggacataggcagcatagtcacacagaacatcttatctctgtkgckgaatkgaatagcatgggatgtgtgcagaggaacatggkgggagtatgtaggtttkgtagtcagacagacckgaactcaaatcttgytcattttttagagcacaggatttggaytccaaattgagggttttaatccccatgccaccattcagcatcttcgactagttattgaacctyttcctcatskataaaagatatagtgtttctgattccttgatggattgttacaaggatgagggatgctgtatgttaaggactcagctcatagttgtgttcaataaatggctgttattttatgaagcctactactacagattatgcaattattactagaataatgccaccttatgtgggtcttcccctctagtcccttattgattgttcttatttctctcaagtattgccaaccaataatctccccttgcttatagaagtggttcaagatctgattataaaatcccacatacttctatagcagataactattaacagataatgtttgractaatttcaccaccaacattccccctcaataaaaccagcttttaatgtaaatcacatagcatactgctttagaaaggcttgaaggtagtaattataaactattattaagcatccaaaatgaaggtctccttttgctaatatcattcagattttcttattactacaattattatgaataaattctgtgaagagtgctttaaaataagagagaaatggragaccaaacttgtacatttaaaatcaggctggaattgaacttgttattgtgtcttaaatccttttttgtgccaaagcaggtatgtatacattaatagtaagatgtacattatttttaaagtacttatmacatgtaagattatcaatatgtatagtttttattgagagatcaaagtaggattaaacttcttgttttgaaagcaggcattactttttaaaaaaaaaaaaaaaaaaaaaaaaaaaaaaaaa

SEQ ID NO: 114 - DNA, 1009 bp, Homo sapiens
gaattcggcacgagctcgtgccgaattctcgtgccgaactgaaacgtatcaagaaatacctgggcttgaagaatattcacctgaaatataccaagaaacatcccagcttgaagaatattcacctgaaatataccaagaaacaccggggcctgaagacctctctactgagacatataaaaataaggatgtgcctaaagaatgctttccagaaccacaccaagaaacaggtgggccccaaggccaggatcctaaagcacaccaggaagatgctaaagatgcttatacttttcctcaagaaatgaaagaaaaacccaaagaagagccaggaataccagcaattctgaatgagagtcatccagaaaatgatgtctatagttatgttttgttttaacaatgctcaaccataaagttgtggtccaatggaacatacagcttaatagtttatgcgtgattttctcaaaatattgtaaaacttttgacaatgctcattaatattattttttctatttgtagaccatatctgaaagaaataacattttttaaggctctaccacatagacaatatcatgctagaatgtgtgtgtgtgtgtgtgtgtgtgtgtgtgtatgtatgtataggtcggggagaggatagtggtgggaacagacaaataaggaagcggggaggactggataattggttttcccccctaagaacatttatttacgtcttaagagcagataagtgactaagactgaacacatacattttgtggagtatatagttttcttgtaaatgctgttcaattattaatgtaacagtagcatcaaaattttattcaggctttagttgactcttttggtcagttttaacaattctccttaaaagatattttggagtgatgaatgtagtttacttttgtatttgaattttgattttctatttttattttttaaatattgtatttgtgcacaatgtacattaaatcattattacatgcttaaaaaaaaaaaaaaaaaaaaaactcga

SEQ ID NO: 115 - DNA, 646 bp, Homo sapiens
  SITE (19): n equals a,t,g, or c
  SITE (544): n equals a,t,g, or c
cagatgccagggacttggncttcccccggttgaaccacaggttccaagaaacctgcagggtccagcctcccccccatccccagtyttccccaccctggcccggccctccaggtgcagaaacatgcaggcccctctccaggactgtgggaggagtgtgtccctcagactggcctgtgtcctggctcctcttaccacctcttccagaggttgtcacctgcagctgccccaggataaaggcaaggccagaraggactcctgaactcctgtgtgcctggggtggcaggggcaaacatagccaactggtggcctgagcggggccatggtgargacacccttggtggcttgtcccacatcaagctgggargtgacacttaggatgcatttttcaatattttagtgtttgaataacgggctawcttgagaaaaaaataatttgaatcacacatcacaccaaaaataaattctaggtggattttaacactttccaaaaattattattagtttagagacagggtctcactccgtcgcctaggctggagtgcangggtatgatcatggttcactgcaaccttaaactccctggcctcatatgatccccccgggctccagcccctccaaagttactgggaaactaccaaacatgccc

SEQ ID NO: 116 - protein, 165 aa, Homo sapiens
MVNPGSSSQPPPVTAGSLSWKRCAGCGGKIADRFLLYAMDSYWHSRCLKCSCCQAQLGDIGTSCYTKSGMILCRNDYIRLFGNSGACSACGQSIPASELVMRAQGNVYHLKCFTCSTCRNRLVPGDRFHYINGSLFCEHDRPTALINGHLNSLQSNPLLPDQKVC

SEQ ID NO: 117 - protein, 36 aa, Homo sapiens
  SITE (36): Xaa equals stop translation
IYSSGYFQIYNMLLLTILILLCNRTPELIPGFYIRX

SEQ ID NO: 118 - protein, 220 aa, Homo sapiens
  SITE (220): Xaa equals stop translation
MSHKLGDPGFVVFATLVVIVALILIFVVGPRHGQTNILVYITICSVIGAFSVSCVKGLGIAIKELFAGKPVLRHPLAWILLLSLIVCVSTQINYLNRALDIFNTSIVTPIYYVFFTTSVLTCSAILFKEWQDMPVDDVIGTLSGFFTIIVGIFLLHAFKDVSFSLASLPVSFRKDEKAMNGNLSNMYEVLNNNEESLTCGIEQHTGENVSRRNGNLTAFX

SEQ ID NO: 119 - protein, 32 aa, Homo sapiens
  SITE (32): Xaa equals stop translation
MTIWERKYIWMLQICVFLEPRAKPSLGDLDWX

SEQ ID NO: 120 - protein, 95 aa, Homo sapiens
  SITE (49): Xaa equals any of the naturally occurring L-amino acids
  SITE (69): Xaa equals any of the naturally occurring L-amino acids
MRRNLIDAGWTYHNRLWTYLPPACAFSVFLLLFDTVLYETLLSFDLVFXFCFFRGEGGFPLLCPDFSLXTNALALWLEHPLPTSVSPHLSYALTC

SEQ ID NO: 121 - protein, 132 aa, Homo sapiens
  SITE (132): Xaa equals stop translation
MLFVFCCTVFFVCLFVYLVGFLEREIWKRDIHKSYTPTFPFYHDIQEETSRAKNGVKKGSMAGTSKELRAVALKNYFFYYYFESMEVFHSLGKGGKSAFIFIQSYLITSKTHMLEIAFAGAKYINEQEYIHX

SEQ ID NO: 122 - protein, 65 aa, Homo sapiens
  SITE (49): Xaa equals any of the naturally occurring L-amino acids
  SITE (65): Xaa equals stop translation
MWYFMSLISMVLLLSPSCSDLLVISVLNLEQRRQSKVGFEPFTSPLCGXWHHLSPDRLPQDGTFX

SEQ ID NO: 123 - protein, 9 aa, Homo sapiens
  SITE (9): Xaa equals stop translation
LLLFCILGX

SEQ ID NO: 124 - protein, 50 aa, Homo sapiens
  SITE (12): Xaa equals any of the naturally occurring L-amino acids
  SITE (15): Xaa equals any of the naturally occurring L-amino acids
  SITE (16): Xaa equals any of the naturally occurring L-amino acids
  SITE (19): Xaa equals any of the naturally occurring L-amino acids
MGVLFVPQETSXKVXXDIXGLSQFVMGEKRTTSIRGIQARYQVDRGLEYC

SEQ ID NO: 125 - protein, 66 aa, Homo sapiens
MLLLLLLLLLLLWTCQKALVRRQFCLFNLIARNSSLMLQKDEKKGKKRDNSQAQRKKKRWGKRAPG

SEQ ID NO: 126 - protein, 27 aa, Homo sapiens
  SITE (27): Xaa equals stop translation
MHNAFNLNVLTLFLSVLCCTFSDSELX

SEQ ID NO: 127 - protein, 24 aa, Homo sapiens
  SITE (19): Xaa equals any of the naturally occurring L-amino acids
  SITE (24): Xaa equals stop translation
MSWLFLLFALLCKFQHKLXFHNIX

SEQ ID NO: 128 - protein, 22 aa, Homo sapiens
  SITE (22): Xaa equals stop translation
MLLFLTVINFMALAKMNFCGDX

SEQ ID NO: 129 - protein, 55 aa, Homo sapiens
  SITE (3): Xaa equals any of the naturally occurring L-amino acids
  SITE (12): Xaa equals any of the naturally occurring L-amino acids
  SITE (13): Xaa equals any of the naturally occurring L-amino acids
  SITE (24): Xaa equals any of the naturally occurring L-amino acids
  SITE (32): Xaa equals any of the naturally occurring L-amino acids
  SITE (34): Xaa equals any of the naturally occurring L-amino acids
  SITE (55): Xaa equals stop translation
MVXNLQVISIWXXSTTCFYACIWXQGCLMLRXFXTLNNVTRLPSSQKPIKCYLLX

SEQ ID NO: 130 - protein, 318 aa, Homo sapiens
  SITE (131): Xaa equals any of the naturally occurring L-amino acids
MLSESSSFLKGVMLGSIFCALITMLGHIRIGHGNRMHHHEHHHLQAPNKEDILKISEDERMELSKSFRVYCIILVKPKDVSLWAAVKETWTKHCDKAEFFSSENVKVFESINMDTNDMWLMMRKAYKYAFXKYRDQYNWFFLARPTTFAIIENLKYFLLKKDPSQPFYLGHTIKSGDLEYVGMEGGIVLSVESMKRLNSLLNIPEKCPEQGGMIWKISEDKQLAVCLKYAGVFAENAEDADGKDVFNTKSVGLSIKEAMTYHPNQVVEGCCSDMAVTFNGLTPNQMHVMMYGVYRLRAFGHIFNDALVFLPPNGSDND

SEQ ID NO: 131 - protein, 59 aa, Homo sapiens
  SITE (59): Xaa equals stop translation
MTWPPSCLVALLLSTVTQKMTPLNLMRTTGPINSFCLLPTFFFFPSYLPSLMPTPTDPX

SEQ ID NO: 132 - protein, 305 aa, Homo sapiens [sequence omitted]

SEQ ID NO: 133 - protein, 29 aa, Homo sapiens
  SITE (7): Xaa equals any of the naturally occurring L-amino acids
  SITE (29): Xaa equals stop translation
MSILLLXFPSAPAPVVSGGLQPWLHSCIX

SEQ ID NO: 134 - protein, 22 aa, Homo sapiens
  SITE (22): Xaa equals stop translation
MGTSLNLQIMALFSGQAMAPRX

SEQ ID NO: 135 - protein, 112 aa, Homo sapiens
  SITE (112): Xaa equals stop translation
MLWLPLLAALSPSPPGVSSEEEQHWSQAEALPCWDPGSESSPRIPGCRELQSCPPPTAPSAHTQSPGGLGAKAGAALVPFPGPSFPTSKPKKGEAGAPVPQPHSALTVPSSX

SEQ ID NO: 136 - protein, 114 aa, Homo sapiens
MEKPLFPLVPLHWFGFGYTALVVSGGIVGYVKTGSVPSLAAGLLFGSLAGLGAYQLYQDPRNVWGFLAATSVTFVGVMGMRSYYYGKFMPVGLIAGASLLMAAKVGVRMLMTSD

SEQ ID NO: 137 - protein, 22 aa, Homo sapiens
  SITE (17): Xaa equals any of the naturally occurring L-amino acids
  SITE (22): Xaa equals stop translation
MITLLIWMLAGFIARIXVALQX

SEQ ID NO: 138 - protein, 52 aa, Homo sapiens
  SITE (12): Xaa equals any of the naturally occurring L-amino acids
  SITE (52): Xaa equals stop translation
MAGVSEISVCFXLLSLFSLFCSFYFPKQATPKRDLFVQESGKGKRNTESWEX

SEQ ID NO: 139 - protein, 99 aa, Homo sapiens
MTSALTQGLERIPDQLGYLVLSEGAVLASSGDLENDEQAASAISELVSTACGFRLHRGMNVPFKRLSVVFGEHTLLVTVSGQRVFVVKRQNRGREPIDV

SEQ ID NO: 140 - protein, 176 aa, Homo sapiens
  SITE (163): Xaa equals any of the naturally occurring L-amino acids
  SITE (176): Xaa equals stop translation
MGSAALEILGLVLCLVGWGGLILACGLPMWQVTAFLDHNIVTAQTTWKGLWMSCVVQSTGHMQCKVYDSVLALSTEVQAARALTVSAVLLAFVALFVTLAGAQCTTCVAPGPAKARVALTGGVLYLFCGLLALVPLCWFANIVVREFYDPSVPVSQKYELGAXCTSAGRPPRCSWX

SEQ ID NO: 141 - protein, 187 aa, Homo sapiens
MVLLWVVTCPATMLTEPQNPHLIGFVAYSGPSHTTQPHKYWLLLDGQADPAAAEGPVKRKAASVVWWPQALRHLSLLVHCWEESYEMNIGCQSLWAGGLASSGNGWDLGVAFRRDTCMSSSSLHWKEFKYAPGSLHYFALSFVLILTEICLVSSGMGFPQEGKHFSVLGSPDCSLWGRDEHVPREFA

SEQ ID NO: 142 - protein, 288 aa, Homo sapiens
  SITE (63): Xaa equals any of the naturally occurring L-amino acids
  SITE (256): Xaa equals any of the naturally occurring L-amino acids
MPAHRFVLAVGSAVFNAMFNGGMATTSTEIELPDVEPAAFLALLKFLYSDEVQIGPETVMTTXYTAKKYAVPALEAHCVEFLKKNLRADNAFMLLTQARLFDEPQLASLCLENIDKNTADAITAEGFTDIDLDTLVAVLERDTLGIREVRLFNAVVRWSEAECQRQQLQVTPENRRKVLGKALGLIRFPLMTIEEFAAGPAQSGILVDREVVSLFCTSPSTPSHEWSSLTGPAAACVGRSAASTASSRWRVAGATXGPVTASGSQSTSASSWWDLGCMDPSTGPPTTK

SEQ ID NO: 143 - protein, 142 aa, Homo sapiens
MPRCRWLSLILLTIPLALVARKDPKKNETGVLRKLKPVNASNANVKQCLWFAMQEYNKESEDKYVFLVVKTLQAQLQVTNLLEYLIDVEIARSDCRKPLSTNEICAIQENSKLKRKLSCSFLVGALPWNGEFTVMEKKCEDA

SEQ ID NO: 144 - protein, 120 aa, Homo sapiens
  SITE (120): Xaa equals stop translation
MSPHPTALLGLVLCLAQTIHTQEEDLPRPSISAEPGTVIPLGSHVTFVCRGPVGVQTFRLERESRSTYNDTEDVSQASPSESEARFRIDSVSEGNAGPYRCIYYKPPKWSEQSDYWSCWX

SEQ ID NO: 145 - protein, 78 aa, Homo sapiens
  SITE (40): Xaa equals any of the naturally occurring L-amino acids
MSPPPTALLHQGSKASGNASWPWPWQAPLTRLWAWSKALXLYCRGSMELSSGQKCLSAGTCPCSYSGLRPLTLQCCLP

SEQ ID NO: 146 - protein, 164 aa, Homo sapiens
  SITE (51): Xaa equals any of the naturally occurring L-amino acids
  SITE (82): Xaa equals any of the naturally occurring L-amino acids
  SITE (89): Xaa equals any of the naturally occurring L-amino acids
  SITE (90): Xaa equals any of the naturally occurring L-amino acids
  SITE (91): Xaa equals any of the naturally occurring L-amino acids
  SITE (163): Xaa equals any of the naturally occurring L-amino acids
  SITE (164): Xaa equals stop translation
MSRPTHTPLSPATISPTITVAVFFAVFVAAAAATAVVAVAAATTSSGRRTXDKSPIATQSSVTHIAAKRCHNYTECLSLIRXTRIPTWXXXTTCPSRIPSTHVAAGAGFIRERACLQCGAVGPPGCILASLPPPSLYLSPELRCMPKRVEARSELRLCPPGVXX

SEQ ID NO: 147 - protein, 73 aa, Homo sapiens
  SITE (73): Xaa equals stop translation
MQRWVCILEFKENLFQIPSSLVALLNTLFLDILHPQNSLSPHGSFSLSSLSFPPLPVSSLQPFLFLRSLLCRX

SEQ ID NO: 148 - protein, 123 aa, Homo sapiens
  SITE (43): Xaa equals any of the naturally occurring L-amino acids
  SITE (73): Xaa equals any of the naturally occurring L-amino acids
  SITE (107): Xaa equals any of the naturally occurring L-amino acids
FGTRFLANLLLEEDNKFCADCQSKGPRWASWNIGVFICIRCAXIHRNLGVHISRVKSVNLDQWTQVQIQCMQXMGNGKANRLYEAYLPETFRRPQIDPAVEGFIRDXYEKKKYMDRSLGHQCL

SEQ ID NO: 149 - protein, 138 aa, Homo sapiens
  SITE (126): Xaa equals any of the naturally occurring L-amino acids
MSLYDDLGVETSDSKTEGWSKNFKLLQSQLQVKKAALTQAKSQRTKQSTVLAPVIDLKRGGSSDDRQIVDTPPHVAAGLKDPVPSGFSAGEVLIPLADEYDPMFPNDYEKVVKRAKRGTTETAGVXKTKGNRRKGKKA

SEQ ID NO: 150 - protein, 356 aa, Homo sapiens
MLARAARGTGALLLRGSLLASGRAPRRASSGLPRNTVVLFVPQQEAWVVERMGRFHRILEPGLNILIPVLDRIRYVQSLKEIVINVPEQSAVTLDNVTLQIDGVLYLRIMDPYKASYGVEDPEYAVTQLAQTTMRSELGKLSLDKVFRERESLNASIVDAINQAADCWGIRCLRYEIKDIHVPPRVKESMQMQVEAERRKRATVLESEGTRESAINVAEGKKQAQILASEAEKAEQINQAAGEASAVLAKAKAKAEAIRILAAALTQHNGDAAASLTVAEQYVSAFSKLAKDSNTILLPSNPGDVTSMVAQAMGVYGALTKAPVPGTPDSLSSGSSRDVQGTDASLDEELDRVKMS

SEQ ID NO: 151 - protein, 40 aa, Homo sapiens
  SITE (10): Xaa equals any of the naturally occurring L-amino acids
  SITE (17): Xaa equals any of the naturally occurring L-amino acids
  SITE (24): Xaa equals any of the naturally occurring L-amino acids
  SITE (26): Xaa equals any of the naturally occurring L-amino acids
  SITE (31): Xaa equals any of the naturally occurring L-amino acids
  SITE (35): Xaa equals any of the naturally occurring L-amino acids
  SITE (40): Xaa equals stop translation
MYILLFWGGXFHRCLSXLFDPELXSXPGISXFTVXLQMTX

SEQ ID NO: 152 - protein, 71 aa, Homo sapiens
  SITE (31): Xaa equals any of the naturally occurring L-amino acids
  SITE (44): Xaa equals any of the naturally occurring L-amino acids
  SITE (48): Xaa equals any of the naturally occurring L-amino acids
  SITE (49): Xaa equals any of the naturally occurring L-amino acids
  SITE (64): Xaa equals any of the naturally occurring L-amino acids
  SITE (70): Xaa equals any of the naturally occurring L-amino acids
MPSPKYCMHTNDVQSVEYNGDTLFQKLSSSXLSFKSIHIYPNEXKTCXXIFISKVYMISKTWKXPRFTSXG

SEQ ID NO: 153 - protein, 33 aa, Homo sapiens
MNFVLFFIGINVGCRGENSLKYFTVTVLCSPRD

SEQ ID NO: 154 - protein, 78 aa, Homo sapiens
MKEAGKGGVADSRELKPMVGGDEEVAALQEFHFHFLSLSVFTDCTSSGEAFVICITQTCCSFCLCAYPSLGWQNSCHN

SEQ ID NO: 155 - protein, 32 aa, Homo sapiens
  SITE (32): Xaa equals stop translation
MFSSKSLLVLPFCFRSAAHLELSVWCVCGVRX

SEQ ID NO: 156 - protein, 464 aa, Homo sapiens
  SITE (35): Xaa equals any of the naturally occurring L-amino acids
  SITE (332): Xaa equals any of the naturally occurring L-amino acids
  SITE (405): Xaa equals any of the naturally occurring L-amino acids
MLALGNNHFIGFVNDSVTKSIVALRLTLVVKVSTXPGESHANDLECSGKGKCTTKPSEATFSCTCEEQYVGTFCEEYDACQRKPCQNNASCIDANEKQDGSNFTCVCLPGYTGELCQSKIDYCILDPCRNGATCISSLSGFTCQCPEGYFGSACEEKVDPCASSPCQNNGTCYVDGVHFTCNCSPGFTGPTCAQLIDFCALSPCAHGTCRSVGTSYKCLCDPGYHGLYCEEEYNECLSAPCLNAATCRDLVNGYECVCLAEYKGTHCELYKDPCANVSCLNGATCDSDGLNGTCICAPGFTGEECDIDINECDSNPCHHGGSCLDQPNGYNXHCPHGWVGANCEIHLQWKSGHMAESLTNMPRHSLYIIIGALCVAFILMLIILIVGICRISRIEYQGSSRPAYXEFYNCRSIDSEFSNAIASIRHARFGKKSRPAMYDVSPIAYEDYSPDDKPLVTLIKTKDL

SEQ ID NO: 157 - protein, 151 aa, Homo sapiens
MHHQMTRTTLMTKQHELGGLLALVQNCQSEMNIKDSRAVGLSVKRLCISFVDEFCERTERPLYLAQGLFMKRETYWEVQDSGISPLLLLLSTALDCSPEAETRQSPGGRKMLQEPTLSMSLQILTGFLWVQLWNWETFLRIRTHSTDASCP

SEQ ID NO: 158 - protein, 299 aa, Homo sapiens
  SITE (211): Xaa equals any of the naturally occurring L-amino acids
MAQNLKDLAGRLPAGPRGMGTALKLLLGAGAVAYGVRESVFTVEGGHRAIFFNRIGGVQQDTILAEGLHFRIPWFQYPIIYDIRARPRKISSPTGSKDLQMVNISLRVLSRPNAQELPSMYQRLGLDYEERVLPSIVNEVLKSVVAKFNASQLITQRAQVSLLIRRELTERAKDFSLILDDVAITELSFSREYTAAVEAKQVAQQEAQRAXFLVEKAKQEQRQKIVQAEGEAEAAKMLGEALSKNPGYIKLRKIRAAQNISKTIATSQNRIYLTADNLVLNLQDESFTRGSDSLIKGKK

SEQ ID NO: 159 - protein, 398 aa, Homo sapiens
  SITE (13): Xaa equals any of the naturally occurring L-amino acids
  SITE (258): Xaa equals any of the naturally occurring L-amino acids
  SITE (398): Xaa equals stop translation
MLRGPWRQLWLFXLLLLPGAPEPRGASRPWEGTDEPGSAWAWPGFQRLQEQLRAAGALSKRYWTLFSCQVWPDDCDEDEEAATGPLGWRLPLLGQRYLDLLTTWYCSFKDCCPRGDCRISNNFTGLEWDLNVRLHGQHLVQQLVLRTVRGYLETPQPEKALALSFHGWSGTGKNFVARMLVENLYRDGLMSDCVRMFIATFHFPHPKYVDLYKEQLMSQIRETQQLCHQTLFIFDEAEKLHPGLLEVLGPHLERRAPXGHRAESPWTIFLFLSNLRGDIINEVVLKLLKAGWSREEITMEHLEPHLQAEIVETIDNGFGHSRLVKENLIDYFIPFLPLEYRHVRLCARDAFLSQELLYKEETLDEIAQMMVYVPKEEQLFSSQGCKSISQRINYFLSX

SEQ ID NO: 160 - protein, 83 aa, Homo sapiens
  SITE (12): Xaa equals any of the naturally occurring L-amino acids
  SITE (83): Xaa equals stop translation
MAFTLYSLLQAXLLCVNAIAVLHEERFLKNIGWGTDQGIGGFGEEPGIKSQLMNLIRSVRTVMRVPLIIVNSIAIVLLLLFGX

SEQ ID NO: 161 - protein, 50 aa, Homo sapiens
  SITE (50): Xaa equals stop translation
MAPRNQGSFSFGNFMLFLVLIERRYLPFLSPILFCCSTHNRSAVTATNLX

SEQ ID NO: 162 - protein, 51 aa, Homo sapiens
  SITE (51): Xaa equals stop translation
MDVLTVAFLSILITAPIGSLLIGLLGPRLLQKVEHQNKDEEVQGETSVQVX

SEQ ID NO: 163 - protein, 194 aa, Homo sapiens
  SITE (177): Xaa equals any of the naturally occurring L-amino acids
MRACLTTRSLPMPACLLTRHPLLCPRRTMPVTSGCRMPSTSASEGLGGRGHAPMQKAQKLPLRQALRLRSLRLPPYRLTSQEGQACIPQRRNCQTLSPVLGWLALGRASRVQPLLMALGLQFFHMCAPPAWPTLSLAVGPEASSLPLGVSGIGMSAWLPSPPHLLLLSAAAGSGASXLRALGSSALEGLQDPSQ

SEQ ID NO: 164 - protein, 53 aa, Homo sapiens
  SITE (53): Xaa equals stop translation
MGRYHFVFLTFFFSTYSSCFYPVVSQVLYLVCSCTADRPLMAPVGSCLGGRNX

SEQ ID NO: 165 - protein, 64 aa, Homo sapiens
  SITE (64): Xaa equals stop translation
MFVTLSILNITIEKDKSTNRFRDVFLQHILVILMPSLTYCLIGQHLCSFTRYVSLCYSRCHSWX

SEQ ID NO: 166 - protein, 33 aa, Homo sapiens
  SITE (33): Xaa equals stop translation
MSICPLLVMLILITWVRCPVSPVYRYCFSFCNX

SEQ ID NO: 167 - protein, 95 aa, Homo sapiens
  SITE (77): Xaa equals any of the naturally occurring L-amino acids
  SITE (95): Xaa equals stop translation
MQDIVYKLVPGLQEGECLTVLLIPEVPAWPLQPLLSWKFGSRMGGPFPFGRITVFSSLLSAQLHLLGWSLLSSKMRXHLFTPYVYSFSKYGSHVX

SEQ ID NO: 168 - protein, 58 aa, Homo sapiens
  SITE (33): Xaa equals any of the naturally occurring L-amino acids
  SITE (58): Xaa equals stop translation
MKVLATSFVLGSLGLAFYLPLVVTTPKTLAIPXEAARSCGESYHQCHNLYCHLWPWLX

SEQ ID NO: 169 - protein, 44 aa, Homo sapiens
  SITE (44): Xaa equals stop translation
MDYGYYSAGQFLLHLFLADLTQATTQQKTNTSENGCKFVCAVFX

SEQ ID NO: 170 - protein, 57 aa, Homo sapiens
MVKMNWCNLLTFMVVLWLCRENVLAGRKYTEAFGDRGYISLATYYQTVQARGKLFVL

SEQ ID NO: 171 - protein, 30 aa, Homo sapiens
  SITE (26): Xaa equals any of the naturally occurring L-amino acids
  SITE (29): Xaa equals any of the naturally occurring L-amino acids
  SITE (30): Xaa equals stop translation
MGNAFEVTGLMLALLCYVVDGQKPKXGFXX

SEQ ID NO: 172 - protein, 37 aa, Homo sapiens
  SITE (37): Xaa equals stop translation
MSHEKSNELVLLIVTVMRSLTYNIAVVAAWFNGCIRX

SEQ ID NO: 173 - protein, 40 aa, Homo sapiens
  SITE (40): Xaa equals stop translation
MYLLYLPSALLPPYPTCPYEHGSPWPHTPAKLLCCFAFLX

SEQ ID NO: 174 - protein, 47 aa, Homo sapiens
  SITE (47): Xaa equals stop translation
MKFIVWRRFKWVIIGLLFLLILLLFVAVLLYSLPNYLSMKIVKPNVX

SEQ ID NO: 175 - protein, 34 aa, Homo sapiens
  SITE (34): Xaa equals stop translation
IEWSGYNKPERKGPLALFLVFLFLDTPPLQGDLX

SEQ ID NO: 176 - protein, 39 aa, Homo sapiens
MLEWTEMTFMPKTMLTCYLYICSKFRKKKSLQFILQQSS

SEQ ID NO: 177 - protein, 25 aa, Homo sapiens
  SITE (25): Xaa equals stop translation
MQLLIVWNESLTNSVPASVDTSQCX

SEQ ID NO: 178 - protein, 262 aa, Homo sapiens
MALGLKCFRMVHPTFRNYLAASIRPVSEVTLKTVHERQHGHRQYMAYSAVPVRHFATKKAKAKGKGQSQTRVNINAALVEDIINLEEVNEEMKSVIEALKDNFNKTLNIRTSPGSLDKIAVVTADGKLALNQISQISMKSPQLILVNMASFPECTAAAIKAIRESGMNLNPEVEGTLIRVPIPQVTREHREMLVKLAKQNTNKAKDSLRKVRTNSMNKLKKSKDTVSEDTIRLIEKQISQMADDTVAELDRHLAVKTKELLG

SEQ ID NO: 179 - protein, 967 aa, Homo sapiens
  SITE (40): Xaa equals any of the naturally occurring L-amino acids
  SITE (45): Xaa equals any of the naturally occurring L-amino acids
  SITE (169): Xaa equals any of the naturally occurring L-amino acids
  SITE (293): Xaa equals any of the naturally occurring L-amino acids
  SITE (297): Xaa equals any of the naturally occurring L-amino acids
  SITE (547): Xaa equals any of the naturally occurring L-amino acids
MQRAVPEGFGRRKLGSDMGNAERAPGSRSFGPVPTLLLLXAALLXVSDALGRPSEEDEELVVPELERAPGHGTTRLRLHAFDQQLDLELRPDSSFLAPGFTLQNVGRKSGSETPLPETDLAHCFYSGTVNGDPSSAAALSLCEGVRGAFYLLGEAYFIQPLPAASERLXTAAPGEKPPAPLQFHLLRRNRQGDVGGTCGVVDDEPRPTGKAETEDEDEGTEGEDEGPQWSPQDPALQGVGQPTGTGSIRKKRFVSSHRYVETMLVADQSMAEFHGSGLKHYLLTLFSVAARLXKHPXIRNSVSLVVVKILVIHDEQKGPEVTSNAALTLRNFCNWQKQHNPPSDRDAEHYDTAILFTRQDLCGSQTCDTLGMADVGTVCDPSRSCSVIEDDGLQAAFTTAHELGHVFNMPHDDAKQCASLNGVNQDSHMMASMLSNLDHSQPWSPCSAYMITSFLDNGHGECLMDKPQNPIQLPGDLPGTSYDANRQCQFTFGEDSKHCPDAASTCSTLWCTGTSGGVLVCQTKHFPWADGTSCGEGKWCINGKCVXKTDRKHFDTPFHGSWGMWGPWGDCSRTCGGGVQYTMRECDNPVPKNGGKYCEGKRVRYRSCNLEDCPDNNGKTFREEQCEAHNEFSKASFGSGPAVEWIPKYAGVSPKDRCKLICQAKGIGYFFVLQPKVVDGTPCSPDSTSVCVQGQCVKAGCDRIIDSKKKFDKCGVCGGNGSTCKKISGSVTSAKPGYHDIITIPTGATNIEVKQRNQRGSRNNGSFLAIKAADGTYILNGDYTLSTLEQDIMYKGVVLRYSGSSAALERIRSFSPLKEPLTIQVLTVGNALRPKIKYTYFVKKKKESFNAIPTFSAWVIEEWGECSKSCELGWQRRLVECRDINGQPASECAKEVKPASTRPCADHPCPQWQLGEWSSCSKTCGKGYKKRSLKCLSHDGGVLSHESCDPLKKPKHFIDFCTMAECS

SEQ ID NO: 180 - protein, 122 aa, Homo sapiens
MYASQWFLTLFTAKFPLCMVFHIIDLLLCEGLNIIFHVALALLKTSKEDLLQADFEGALKFFRVQLPKRYRAEENARRLMEQACNIKVPTKKLKKYEKEYQTMRESQLQQEDPMDRYKFVYL

SEQ ID NO: 181 - protein, 57 aa, Homo sapiens
  SITE (2): Xaa equals any of the naturally occurring L-amino acids
  SITE (39): Xaa equals any of the naturally occurring L-amino acids
MXGQSQPWHKHLCIKVLLLCNNSPQTEGWKPPCHRTATXRIQRHLPGLMSVQAGLMP

SEQ ID NO: 182 - protein, 54 aa, Homo sapiens
MDSMPEPASRCLLLLPLLLLLLLLLPAPELGPSQAGAEENDWVRLPSKCEGTCG

SEQ ID NO: 183 - protein, 436 aa, Homo sapiens
  SITE (249): Xaa equals any of the naturally occurring L-amino acids
  SITE (253): Xaa equals any of the naturally occurring L-amino acids
  SITE (317): Xaa equals any of the naturally occurring L-amino acids
  SITE (322): Xaa equals any of the naturally occurring L-amino acids
  SITE (356): Xaa equals any of the naturally occurring L-amino acids
  SITE (436): Xaa equals stop translation
MPLFLLSLPTPPSASGHERRQRPEAKTSGSEKKYLRAMQANRSQLHSPPGTGSSEDASTPQCVHTRLTGEGSCPHSGDVHIQINSIPKECAENASSRNIRSGVHSCAHGCVHSRLRGHSHSEARLTDDTAAESGDHGSSSFSEFRYLFKWLQKSLPYILILSVKLVMQHITGISLGIGLLTTFMYANKSIVNQVFLRERSSKIQCAWLLVFLAGSSVLLYYTFHSQSLYYSLIFLNPTLDHLSFWEVFXIVGXTDFILKFFFMGLKCLILLVPSFIMPFKSKGYWYMLLEELCQYYRTFVPIPVWFRYLISYGEFGXVTRWXLGILLALLYLILKLLEFFGHLRTFRQVLRIFFTXPSYGVAASKRQCSDVDDICSICQAEFQKPILLICQHIFCEECMTLWFNREKTCPLCRTVISDHINKWKDGATSSHLQIYX

SEQ ID NO: 184 - protein, 175 aa, Homo sapiens
  SITE (175): Xaa equals stop translation
VVFGASLFLLLSLTVFSIVSVTAYIALALLSVTISFRIYKGVIQAIQKSDEGHPFRAYLESEVAISEELVQKYSNSALGHVNCTIKELRRLFLVDDLVDSLKFAVLMWVFTYVGALFNGLTLLILALISLFSVPVIYERHQAQIDHYLGLANKNVKDAMAKIQAKIPGLKRKAEX

SEQ ID NO: 185 - protein, 56 aa, Homo sapiens
MAVTLSLLLGGRVCAPSLAVGSRPGGWRAQALLAGSRTPIPTGSRRNGSCRRWRAP

SEQ ID NO: 186 - protein, 144 aa, Homo sapiens
  SITE (63): Xaa equals any of the naturally occurring L-amino acids
MKLQFPLTFSGTVRPICLPFFDEELTPATPLWIIGWGFTKQNGGKMSDILLQASVQVIDSTRXNADDAYQGEVTEKMMCAGIPEGGVDTCQGDSGGPLMYQSDQWHVVGIVSWGYGCGGPSTPGVYTKVSAYLNWIYNVWKAEL

SEQ ID NO: 187 - protein, 44 aa, Homo sapiens
  SITE (26): Xaa equals any of the naturally occurring L-amino acids
  SITE (44): Xaa equals stop translation
MSNTLLSQWLLLLTLFKCIILPLNLXPIIRTIPDWSPELGTNTX

SEQ ID NO: 188 - protein, 59 aa, Homo sapiens
  SITE (59): Xaa equals stop translation
MWQVRRGGCVLAVCSQARGTGGRLGWVGTSSLRVRMAESTSLMSQGRSPIPRMTPARPX

SEQ ID NO: 189 - protein, 111 aa, Homo sapiens
MCILTELERGMVGPVTLHKKIHTTTVLFIVQIHILLIQAITQAKLQMHLMILQMTGLSILALLGKSTTTIVEQKFHNGKNQKSGLKENRDKKKQTRWQSTASQKIGITEER

SEQ ID NO: 190 - protein, 166 aa, Homo sapiens
  SITE (150): Xaa equals any of the naturally occurring L-amino acids
MNIKHLVDPIDDLFLAAKKIPGISSTGVGDGGNELGMGKVKEAVRRHIRHGDVIACDVEADFAVIAGVSNWGGYALACALYILYSCAVHSQYLRKAVGPSRAPGDQAWTQALPSVIKEEKMLGILVQHKVRSGVSGIVGMEVDGLPFHNXHAEMIQKLVDVTTAQV

SEQ ID NO: 191 - protein, 78 aa, Homo sapiens
MTLIQNCWYSWLFFGFFFHFLRKSISIFSIFLVCFRILALGPTCFLVWFWKAFFRHILIFICLSREVFRPRCFLVYFR

SEQ ID NO: 192 - protein, 36 aa, Homo sapiens
MYLPVYAFKVLVTLSYRALTPVSEKSQTLMTIKASS

SEQ ID NO: 193 - protein, 32 aa, Homo sapiens
  SITE (31): Xaa equals any of the naturally occurring L-amino acids
  SITE (32): Xaa equals stop translation
MIQSGLIAILLSFLKVYVEGRPCVCFSKGLXX

SEQ ID NO: 194 - protein, 34 aa, Homo sapiens
MSLFFFLFSLFILSFLHDICYFLIPVSLKHSGIK

SEQ ID NO: 195 - protein, 33 aa, Homo sapiens
  SITE (33): Xaa equals stop translation
MRFLLTVWGSFPFMLIPVFLSIGTKEMKKAQRX

SEQ ID NO: 196 - protein, 84 aa, Homo sapiens
  SITE (35): Xaa equals any of the naturally occurring L-amino acids
  SITE (44): Xaa equals any of the naturally occurring L-amino acids
  SITE (84): Xaa equals stop translation
MRVPPVLRGRILPLVLQCTLLEFCLCATTVLPTVXCWKPRLPVXASGLYVDRMSLWKYGCSGWNESARPRRAGGTMRPPRSGRX

SEQ ID NO: 197 - protein, 123 aa, Homo sapiens
  SITE (96): Xaa equals any of the naturally occurring L-amino acids
  SITE (123): Xaa equals stop translation
MAGAFVAVFLLAMFYEGLKIARESLLRKSQVSIRYNSMPVPGPNGTILMETHKTVGQQMLSFPHLLQTVLHIIQVVISYFLMLIFMTYNGYLCIAXAAGAGTGYFLFSWKKAVVVDITEHCHX

SEQ ID NO: 198 - protein, 143 aa, Homo sapiens
  SITE (143): Xaa equals stop translation
MGCLVWGPSWPPLSLLASLLHSGIAGRCLLCLFKGLAAAASLQIRDLASRLTTGPRTCRVQPPPHPQSSPPWPGPPGAETCRPLSRTVGGVCPSDWPVSWLLLPPLPEVVTCSCPRIKARPERTPELLCAWGGRGKHSQLVAX

SEQ ID NO: 199 - protein, 51 aa, Homo sapiens
  SITE (51): Xaa equals stop translation
MPNVMLTLFVMTLSSASNLGLYFFKFNFECSCMFGTSLLTAKDKLFICITX

SEQ ID NO: 200 - protein, 222 aa, Homo sapiens
  SITE (139): Xaa equals any of the naturally occurring L-amino acids
  SITE (140): Xaa equals any of the naturally occurring L-amino acids
  SITE (160): Xaa equals any of the naturally occurring L-amino acids
  SITE (164): Xaa equals any of the naturally occurring L-amino acids
  SITE (222): Xaa equals stop translation
MSLLVLVLSWGSMGLEAATAVGLSDFCSNPDPYVLNLTQEETGLSSDILSYYLLCNRAVSNPFQQRLTLSQRALANIHSQLLGLEREAVPQFPSAQKPLLSLEETLNVTEGNFHQLVALLHCRSLHKDYGAALRGLCEXXLEGLLFLLLFSLLSAGALAXALCXLPRAWALFPPRNPSALCSGSRLSEPLLPAGLEPGSPLRSFPGCRRDPTNPACLGSDHX

SEQ ID NO: 201 - protein, 102 aa, Homo sapiens
  SITE (102): Xaa equals stop translation
MSQLSRTSLSLLLTLLVLWGSSCCLPIWCLPNRHRLLKLSFLLFSPDIPYLSHTHPNNISCSVLSLRQHLNFTQPGALFTCLVQIQFGLILQPCISKWGLGX

SEQ ID NO: 202 - protein, 32 aa, Homo sapiens
  SITE (18): Xaa equals any of the naturally occurring L-amino acids
  SITE (32): Xaa equals stop translation
MDSYWHSRCLKCSCCQAXWATSARPVTPKVAX

SEQ ID NO: 203 - protein, 27 aa, Homo sapiens
  SITE (27): Xaa equals stop translation
MLTFLLFIPVAPTETSQKNRSVFLPPX

SEQ ID NO: 204 - protein, 13 aa, Homo sapiens
  SITE (10): Xaa equals any of the naturally occurring L-amino acids
  SITE (13): Xaa equals stop translation
MIALFFVTTXLTX

SEQ ID NO: 205 - protein, 76 aa, Homo sapiens
  SITE (76): Xaa equals stop translation
MLLLLLLLLLLLWTCQKALVRRQFCLFNLIARNSSLMLQKDEKKGKKRDNSQAQREKKGGGKEPQGDLQERPGPGX

SEQ ID NO: 206 - protein, 61 aa, Homo sapiens
  SITE (61): Xaa equals stop translation
MTYHPNQVVEGCCSDMAVTFNGLTPNQMHVMMYGVYRLRAFGHIFNDALVFLPPNGSDNDX

SEQ ID NO: 207 - protein, 99 aa, Homo sapiens
  SITE (99): Xaa equals stop translation
ILFSFLIPSNLSFSPVIFFLCGPFKVVIICTELQNVSRSPQTTLATVYCNKITSYICRNSFGVILFFPLNIYNWTNAGKKKKMVSKKPKIKFRGHQAFX

SEQ ID NO: 208 - protein, 71 aa, Homo sapiens
  SITE (71): Xaa equals stop translation
MSSSSLHWKEFKYAPGSLHYFALSFVLILTEICLVSSGMGFPQEGKHFSVLGSPDCSLWGRDEHVPREFAX

SEQ ID NO: 209 - protein, 10 aa, Homo sapiens
  SITE (10): Xaa equals stop translation
MHLRFPFLCX

SEQ ID NO: 210 - protein, 50 aa, Homo sapiens
  SITE (50): Xaa equals stop translation
MRRVARGRGLALPSLEHRPSCSYDALPLPFCETRNPEAHLYFFRTDVERX

SEQ ID NO: 211 - protein, 13 aa, Homo sapiens
  SITE (13): Xaa equals stop translation
AKILVFIFLFELX

SEQ ID NO: 212 - protein, 38 aa, Homo sapiens
  SITE (38): Xaa equals stop translation
MFQECIPISLFFLNWLKECCSFTCPNSHINNCLTGIRX

SEQ ID NO: 213 - protein, 34 aa, Homo sapiens
  SITE (28): Xaa equals any of the naturally occurring L-amino acids
  SITE (34): Xaa equals stop translation
MNFVLFFIGINVGCRGENSLKYFTVTVXCSPRDX

SEQ ID NO: 214 - protein, 26 aa, Homo sapiens
  SITE (26): Xaa equals stop translation
MLLFLFVCLPITWMAEFLSQLRHLLX

SEQ ID NO: 215 - protein, 105 aa, Homo sapiens
  SITE (105): Xaa equals stop translation
MPRHSLYIIIGALCVAFILMLIILIVGICRISRIEYQGSSRPAYEEFYNCRSIDSEFSNAIASIRHARFGKKSRPAMYDVSPIAYEDYSPDDKPLVTLIKTKDLX

SEQ ID NO: 216 - protein, 64 aa, Homo sapiens
  SITE (64): Xaa equals stop translation
LKSCLLLVSFLSGRVPSYDLIYVCSIALETGFVCEMALSFVDHFCREIVDLGRAEATADMPGVX

SEQ ID NO: 217 - protein, 18 aa, Homo sapiens
  SITE (18): Xaa equals stop translation
GIVLLIGVLVQVSAVDDX

SEQ ID NO: 218 - protein, 19 aa, Homo sapiens
  SITE (19): Xaa equals stop translation
MLKIPTHLEGKIKITKVYX

SEQ ID NO: 219 - protein, 9 aa, Homo sapiens
  SITE (9): Xaa equals stop translation
MLILFLKKX

SEQ ID NO: 220 - protein, 46 aa, Homo sapiens
  SITE (43): Xaa equals any of the naturally occurring L-amino acids
  SITE (46): Xaa equals stop translation
MQAPLQDCGRSVSLRLACVLAPLTTSSRGCHLQLPQDKGKARXDSX

SEQ ID NO: 221 - protein, 266 aa, Homo sapiens
  SITE (114): Xaa equals any of the naturally occurring L-amino acids
  SITE (245): Xaa equals any of the naturally occurring L-amino acids
MNGSHKDPLLPFPASARTPSLPPAPPAQAPLPWKPSGFARISPPPPLAILQYRGKADHGESGQQLAAAPGDGRLPLLEAVRRLRGQDCGPLSALCHGQLLAQPVPQVLLLPGAXGDIGTSCYTKSGMILCRNDYIRLFGNSGACSACGQSIPASELVMRAQGNVYHLKCFTCSTCRNRLVPGDRFHYINGSLFCEHDRPTALINGHLNSLQSNPLLPDQKVCKVRVMQNACLHLRFVHHRWIPCXFSRQVTFVASTSASSMPLHLL

SEQ ID NO: 222 - protein, 94 aa, Homo sapiens
MARTRTPSSPFLLLRELPPSLQLRQPRRPFPGSRAASLAFHRRRLSQYCNIGEKQTMVNPGSSSQPPPVTAGSLSWKRCAGCGGKIADRFLLYA

SEQ ID NO: 223 - protein, 24 aa, Homo sapiens
LFGNSGACSACGQSIPASELVMRA

SEQ ID NO: 224 - protein, 19 aa, Homo sapiens
HDRPTALINGHLNSLQSNP

SEQ ID NO: 225 - protein, 12 aa, Homo sapiens
LVPGDRFHYING

SEQ ID NO: 226 - protein, 81 aa, Homo sapiens
  SITE (28): Xaa equals any of the naturally occurring L-amino acids
  SITE (56): Xaa equals any of the naturally occurring L-amino acids
MKYMGGCAKVMCKYYVILYQGLEYPLLXSGDPETSPPWILRADCIVLSSRNFHSNXGRLTINKIYVIGGGKYRGEVTNGAK

SEQ ID NO: 227 - protein, 41 aa, Homo sapiens [sequence omitted]

SEQ ID NO: 228 - protein, 35 aa, Homo sapiens
MVLLLLTVASYTVFWMIGDVLDILFLWNFEYTTLY

SEQ ID NO: 229 - protein, 38 aa, Homo sapiens
  SITE (32): Xaa equals any of the naturally occurring L-amino acids
MELYNSLCPICYFSTVLTTTYYIYFVYSQSSXIRMKVP

SEQ ID NO: 230 - protein, 45 aa, Homo sapiens
MQIVIVLYCVRNKDKKKVCTCSVQTQFFFPIFPILGCLNGCRTQE

SEQ ID NO: 231 - protein, 28 aa, Homo sapiens
  SITE (28): Xaa equals any of the naturally occurring L-amino acids
MKYMGGCAKVMCKYYVILYQGLEYPLLX

SEQ ID NO: 232 - protein, 35 aa, Homo sapiens
  SITE (7): Xaa equals any of the naturally occurring L-amino acids
  SITE (35): Xaa equals any of the naturally occurring L-amino acids
LEYPLLXSGDPETSPPWILRADCIVLSSRNFHSNX

SEQ ID NO: 233 - protein, 32 aa, Homo sapiens
  SITE (7): Xaa equals any of the naturally occurring L-amino acids
RNFHSNXGRLTINKIYVIGGGKYRGEVTNGAK

SEQ ID NO: 234 - protein, 19 aa, Homo sapiens
MLLLTILILLCNRTPELIP

SEQ ID NO: 235 - protein, 145 aa, Homo sapiens
VTNEMSQGRGKYDFYIGLGLAMSSSIFIGGSFILKKKGLLRLARKGSMRAGQGGHAYLKEWLWWAGLLSMGAGEVANFAAYAFAPATLVTPLGALSVLVSAILSSYFLNERLNLHGKIGCLLSILGSTVMVIHAPKEEEIETLNE

SEQ ID NO: 236 - protein, 78 aa, Homo sapiens
VTNEMSQGRGKYDFYIGLGLAMSSSIFIGGSFILKKKGLLRLARKGSMRAGQGGHAYLKEWLWWAGLLSMGAGEVANF

SEQ ID NO: 237 - protein, 30 aa, Homo sapiens
NFAAYAFAPATLVTPLGALSVLVSAILSSY

SEQ ID NO: 238 - protein, 36 aa, Homo sapiens
ERLNLHGKIGCLLSILGSTVMVIHAPKEEEIETLNE

SEQ ID NO: 239 - protein, 295 aa, Homo sapiens
PTAHLANPSPSTVNSGSAGPRPPAGAVVAAPGGALASVSFDSRDSKMAAQSAPKVVLKSTTKMSLNERFTNMLKNKQPTPVNIRASMQQQQQLASARNRRLAQQMENRPSVQAALKLKQKSLKQRLGKSNIQARLGRPIGALARGAIGGRGLPIIQRGLPRGGLRGGRATRTLLRGGMSLRGQNLLRGGRAVAPRMGLRRGGVRGRGGPGRGGLGRGAMGRGGIGGRGRGMIGRGRGGFGGRGRGRGRGRGALARPVLTKEQLDNQLDAYMSKTKGHLDAELDAYMAQTDPETND

SEQ ID NO: 240 - protein, 23 aa, Homo sapiens
PPAGAVVAAPGGALASVSFDSRD

SEQ ID NO: 241 - protein, 29 aa, Homo sapiens
AQSAPKVVLKSTTKMSLNERFTNMLKNKQ

SEQ ID NO: 242 - protein, 23 aa, Homo sapiens
RNRRLAQQMENRPSVQAALKLKQ

SEQ ID NO: 243 - protein, 25 aa, Homo sapiens
GLPRGGLRGGRATRTLLRGGMSLRG

SEQ ID NO: 244 - protein, 24 aa, Homo sapiens
GGRAVAPRMGLRRGGVRGRGGPGR

SEQ ID NO: 245 - protein, 26 aa, Homo sapiens
RGMIGRGRGGFGGRGRGRGRGRGALA

SEQ ID NO: 246 - protein, 28 aa, Homo sapiens
QLDNQLDAYMSKTKGHLDAELDAYMAQT

SEQ ID NO: 247 - protein, 31 aa, Homo sapiens
RFKTLMTNKSEQDGDSSKTIEISDMKYHIFQ

SEQ ID NO: 248 - protein, 20 aa, Homo sapiens
  SITE (17): Xaa equals any of the naturally occurring L-amino acids
LVEGKLFYAHKVLLVTXSNR

SEQ ID NO: 249 - protein, 21 aa, Homo sapiens
MTVKPCLVFSCAFGLLVSRLS

SEQ ID NO: 250 - protein, 30 aa, Homo sapiens
IYTHKYYKFRESDQPQLFLFEVGERNQKSE

SEQ ID NO: 251 - protein, 34 aa, Homo sapiens
NSLVRSVTEWCANVRGNPCAAALSCPQAVLDAGK

SEQ ID NO: 252 - DNA, 87 bp, Homo sapiens
ccttaaaagctgacattttataattgtgttgtatagcagcaactatatccttccaaaaatcaaatgttttttgaccattgttcagtt

SEQ ID NO: 253 - DNA, 38 bp, Homo sapiens
ccttaaaagctgacattttataattgtgttgtatagca

SEQ ID NO: 254 - DNA, 38 bp, Homo sapiens
cttccaaaaatcaaatgttttttgaccattgttcagtt

SEQ ID NO: 255 - protein, 455 aa, Homo sapiens
MAQHFSLAACDVVGFDLDHTLCRYNLPESAPLIYNSFAQFLVKEKGYDKELLNVTPEDWDFCCKGLALDLEDGNFLKLANNGTVLRASHGTKMMTPEVLAEAYGKKEWKHFLSDTGMACRSGKYYFYDNYFDLPGALLCARVVDYLTKLNNGQKTFDFWKDIVAAIQHNYKMSAFKENCGIYFPEIKRDPGRYLHSCPESVKKWLRQLKNAGKILLLITSSHSDYCRLLCEYILGNDFTDLFDIVITNALKPGFFSHLPSQRPFRTLENDEEQEALPSLDKPGWYSQGNAVHLYELLKKMTGKPEPKVVYFGDSMHSDIFPARHYSNWETVLILEELRGDEGTRSQRPEESEPLEKKGKYEGPKAKPLNTSSKKWGSFFIDSVLGLENTEDSLVYTWSCKRISTYSTIAIPSIEAIAELPLDYKFTRFSSSNSKTAGYYPNPPLVLSSDETLISK

SEQ ID NO: 256 - protein, 27 aa, Homo sapiens
TSSHSDYCRLLCEYILGNDFTDLFDIV

SEQ ID NO: 257 - protein, 49 aa, Homo sapiens
MAQHFSLAACDVVGFDLDHTLCRYNLPESAPLIYNSFAQFLVKEKGYDK

SEQ ID NO: 258 - protein, 52 aa, Homo sapiens
ELLNVTPEDWDFCCKGLALDLEDGNFLKLANNGTVLRASHGTKMMTPEVLAE

SEQ ID NO: 259 - protein, 49 aa, Homo sapiens
AYGKKEWKHFLSDTGMACRSGKYYFYDNYFDLPGALLCARVVDYLTKLN

SEQ ID NO: 260 - protein, 52 aa, Homo sapiens
NGQKTFDFWKDIVAAIQHNYKMSAFKENCGIYFPEIKRDPGRYLHSCPESVK

SEQ ID NO: 261 - protein, 54 aa, Homo sapiens
KWLRQLKNAGKILLLITSSHSDYCRLLCEYILGNDFTDLFDIVITNALKPGFFS

SEQ ID NO: 262 - protein, 50 aa, Homo sapiens
HLPSQRPFRTLENDEEQEALPSLDKPGWYSQGNAVHLYELLKKMTGKPEP

SEQ ID NO: 263 - protein, 52 aa, Homo sapiens
KVVYFGDSMHSDIFPARHYSNWETVLILEELRGDEGTRSQRPEESEPLEKKG

SEQ ID NO: 264 - protein, 51 aa, Homo sapiens
KYEGPKAKPLNTSSKKWGSFFIDSVLGLENTEDSLVYTWSCKRISTYSTIA

SEQ ID NO: 265 - protein, 46 aa, Homo sapiens
IPSIEAIAELPLDYKFTRFSSSNSKTAGYYPNPPLVLSSDETLISK

SEQ ID NO: 266 - protein, 327 aa, Homo sapiens
  SITE (273): Xaa equals any of the naturally occurring L-amino acids
MKTKNIPEAHQDAFKTGFAEGFLKAQALTQKTNDSLRRTRLILFVLLLFGIYGLLKNPFLSVRFRTTTGLDSAVDPVQMKNVTFEHVKGVEEAKQELQEVVEFLKNPQKFTILGGKLPKGILLVGPPGTGKTLLARAVAGEADVPFYYASGSEFDEMFVGVGASRIRNLFREAKANAPCVIFIDELDSVGGKRIESPMHPYSRQTINQLLAEMDGFKPNEGVIIIGATNFPEALDNALIRPGRFDMQVTVPRPDVKGRTEILKWYLNKIKFDXSVDPEIIARGTVGFSGAELENLVNQAALKAAVDGKEMVTMKELGVFQRQNSNGA

SEQ ID NO: 267 - protein, 21 aa, Homo sapiens
MKTKNIPEAHQDAFKTGFAEG

SEQ ID NO: 268 - protein, 23 aa, Homo sapiens
PVQMKNVTFEHVKGVEEAKQELQ

SEQ ID NO: 269 - protein, 23 aa, Homo sapiens
SRQTINQLLAEMDGFKPNEGVII

SEQ ID NO: 270 - protein, 24 aa, Homo sapiens
FSGAELENLVNQAALKAAVDGKEM

SEQ ID NO: 271 - protein, 192 aa, Homo sapiens
  SITE (137): Xaa equals any of the naturally occurring L-amino acids
LPMWQVTAFLDHNIVTAQTTWKGLWMSCVVQSTGHMQCKVYDSVLALSTEVQAARALTVSAVLLAFVALFVTLAGAQCTTCVAPGPAKARVALTGGVLYLFCGLLALVPLCWFANIVVREFYDPSVPVSQKYELGAXLYIGWAATALLMVGGCLLCCGAWVCTGRPDLSFPVKYSAPRRPTATGDYDKKNYV

SEQ ID NO: 272 - protein, 48 aa, Homo sapiens
EVRQTRGANGLGPRAGSAGAKAPGPAQGAAQHGLGGSAGLRVRVSPLA

SEQ ID NO: 273 - protein, 23 aa, Homo sapiens
RGANGLGPRAGSAGAKAPGPAQG

SEQ ID NO: 274 - protein, 317 aa, Homo sapiens
  SITE (47): Xaa equals any of the naturally occurring L-amino acids
  SITE (159): Xaa equals any of the naturally occurring L-amino acids
  SITE (262): Xaa equals any of the naturally occurring L-amino acids
RLRAARGSVIGCGTMTRARIGCFGPGGRARGTESAPEPSKRVPPGRXWQTLGGATDPRGKRTGAKSRERGRKGTRARPGRRAARPWGFCGPSGARLASSHGVRSVGDPGPGAVPGGLGGSDPGVRAAHVAGDRLPGPQHRDGADHLEGAVDVVRGAEHXAHAVQSVRLGAGSEHRGAGGAGAHRERRAAGVRCALRDPGGRAVHHLRGPGPGQGACGPHGRRALPVLRAAGARATLLVRQHCRPRVLRPVCARVAEVRAGRXLYIGWAATALLMVGGCLLCCGAWVCTGRPDLSFPVKYSAPRRPTATGDYDKKNYV

SEQ ID NO: 275 - protein, 27 aa, Homo sapiens
  SITE (27): Xaa equals any of the naturally occurring L-amino acids
GCFGPGGRARGTESAPEPSKRVPPGRX

SEQ ID NO: 276 - protein, 27 aa, Homo sapiens
GGATDPRGKRTGAKSRERGRKGTRARP

SEQ ID NO: 277 - protein, 25 aa, Homo sapiens
GPSGARLASSHGVRSVGDPGPGAVP

SEQ ID NO: 278 - protein, 26 aa, Homo sapiens
AAHVAGDRLPGPQHRDGADHLEGAVD

SEQ ID NO: 279 - protein, 23 aa, Homo sapiens
AVQSVRLGAGSEHRGAGGAGAHR

SEQ ID NO: 280 - protein, 27 aa, Homo sapiens
CALRDPGGRAVHHLRGPGPGQGACGPH

SEQ ID NO: 281 - protein, 27 aa, Homo sapiens
RATLLVRQHCRPRVLRPVCARVAEVRA

SEQ ID NO: 282 - protein, 27 aa, Homo sapiens
LYIGWAATALLMVGGCLLCCGAWVCTG

SEQ ID NO: 283 - protein, 7 aa, Homo sapiens
MGSAALE

SEQ ID NO: 284 - protein, 37 aa, Homo sapiens
ACGLPMWQVTAFLDHNIVTAQTTWKGLWMSCVVQSTG

SEQ ID NO: 285 - protein, 21 aa, Homo sapiens
HMQCKVYDSVLALSTEVQAAR

SEQ ID NO: 286 - protein, 20 aa, Homo sapiens
GAQCTTCVAPGPAKARVALT

SEQ ID NO: 287 - protein, 42 aa, Homo sapiens
GGVLYLFCGLLALVPLCWFANIVVREFYDPSVPVSQKYELGA

SEQ ID NO: 288 - protein, 9 aa, Homo sapiens
LYIGWAATA

SEQ ID NO: 289 - protein, 24 aa, Homo sapiens
LHYFALSFVLILTEICLVSSGMGF

SEQ ID NO: 290 - protein, 31 aa, Homo sapiens
QLRNGIPPGRKALFCSGKPRLFTLGQGRTCA

SEQ ID NO: 291 - protein, 39 aa, Homo sapiens
WSGLWVTTWNGSSGERTPSPWRRKRASQSAGRIASWMSF

SEQ ID NO: 292 - protein, 6 aa, Homo sapiens
WRTQGP

SEQ ID NO: 293 - protein, 102 aa, Homo sapiens
  SITE (45): Xaa equals any of the naturally occurring L-amino acids
PVGRVTGQGPAGRWVRRLPCSRRAGGERGPHWGVWAGPQMSCGLXFGPWFVPMLLMSHSLLPSWSGLWVTTWNGSSGERTPSPWRRKRASQSAGRIASWMSF

SEQ ID NO: 294 - protein, 29 aa, Homo sapiens
WVRRLPCSRRAGGERGPHWGVWAGPQMSC

SEQ ID NO: 295 - protein, 26 aa, Homo sapiens
WSGLWVTTWNGSSGERTPSPWRRKRA

SEQ ID NO: 296 - protein, 117 aa, Homo sapiens
TLAVNLCGQAVWPLVGMAGIWALPLGGIPACLVPVCTGKNSNMHLAPFTILPYPLCSFLLKSVLSAQEWDSPRKESTFLFWEAQTVHFGAGTNMCLVNLLENSHHLLPPSLYSEKPD

SEQ ID NO: 297 - protein, 23 aa, Homo sapiens
LVGMAGIWALPLGGIPACLVPVC

SEQ ID NO: 298 - protein, 22 aa, Homo sapiens
FLLKSVLSAQEWDSPRKESTFL

SEQ ID NO: 299 - protein, 26 aa, Homo sapiens
AGTNMCLVNLLENSHHLLPPSLYSEK

SEQ ID NO: 300 - protein, 9 aa, Homo sapiens
VGKGLSSQR

SEQ ID NO: 301 - protein, 217 aa, Homo sapiens
KNHLGAWSEEDTPPMALGRTQVPGVTGQKHAGWVGAWPEWGGAVPQHLGVAPTAPGGLGQQYVQASSAPGPGRGRLGPHSAAGELWGTGSESHLGLQGPRGPSREAGQRGPLSGPIRWMRTDTANRSPPGPGLGLSGRGRPHTESCVRRTQAGIQAVGTPRRLGLGGLGHVTGGARVLINGQEQKERKVWDPRLWEQRHPGWLLAEKWESQMHCNVQ

SEQ ID NO: 302 - protein, 23 aa, Homo sapiens
TPPMALGRTQVPGVTGQKHAGWV

SEQ ID NO: 303 - protein, 22 aa, Homo sapiens
YVQASSAPGPGRGRLGPHSAAG

SEQ ID NO: 304 - protein, 26 aa, Homo sapiens
HLGLQGPRGPSREAGQRGPLSGPIRW

SEQ ID NO: 305 - protein, 21 aa, Homo sapiens
LGLSGRGRPHTESCVRRTQAG

SEQ ID NO: 306 - protein, 25 aa, Homo sapiens
PRRLGLGGLGHVTGGARVLINGQEQ

SEQ ID NO: 307 - protein, 246 aa, Homo sapiens
  SITE (108): Xaa equals any of the naturally occurring L-amino acids
GAAVQCRCPLVRGRVSAAAAAGDAREQAEGSGQGPGPHSLPAHDHRGVRCRSRTVGHPGGPRGGQPLLHFTVNPKPRVEFIDRPRCCLRGKECSINRFQQVESRWGYXGTSDRIRFSVNKRIFVVGFGLYGSIHGPTDYQVNIQIIHTDSNTVLGQNDTGFSCDGSASTFRVMFKEPVEVLPNVNYTACATLKGPDSHYGTKGLRKVTHESPTTGAKTCFTFCYAAGNNNGTSVEDGQIPEVIFYT

SEQ ID NO: 308 - protein, 24 aa, Homo sapiens
EQAEGSGQGPGPHSLPAHDHRGVR

SEQ ID NO: 309 - protein, 23 aa, Homo sapiens
GPRGGQPLLHFTVNPKPRVEFID

SEQ ID NO: 310 - protein, 27 aa, Homo sapiens
  SITE (17): Xaa equals any of the naturally occurring L-amino acids
ECSINRFQQVESRWGYXGTSDRIRFSV

SEQ ID NO: 311 - protein, 25 aa, Homo sapiens
YGSIHGPTDYQVNIQIIHTDSNTVL

SEQ ID NO: 312 - protein, 24 aa, Homo sapiens
SCDGSASTFRVMFKEPVEVLPNVN

SEQ ID NO: 313 - protein, 26 aa, Homo sapiens
VTHESPTTGAKTCFTFCYAAGNNNGT

SEQ ID NO: 314 - protein, 115 aa, Homo sapiens
  SITE (101): Xaa equals any of the naturally occurring L-amino acids
HSASDQRTTALNSRTSRMPSVSRSRTATSVSRSMSVKPSAVMASAVFLSMFSRHRLASCGSSKSRACVSSMKALSARRFFFRNSTQWASSAGTAYFLAVYXVVITVSGPICTSSE

SEQ ID NO: 315 - protein, 26 aa, Homo sapiens
TTALNSRTSRMPSVSRSRTATSVSRS

SEQ ID NO: 316 - protein, 25 aa, Homo sapiens
SRHRLASCGSSKSRACVSSMKALSA

SEQ ID NO: 317 - protein, 14 aa, Homo sapiens
EYNKESEDKYVFLV

SEQ ID NO: 318 - protein, 14 aa, Homo sapiens
IDVEIARSDCRKPL

SEQ ID NO: 319 - protein, 142 aa, Homo sapiens; identical to SEQ ID NO: 143

SEQ ID NO: 320 - protein, 92 aa, Homo sapiens
CLWFAMQEYNKESEDKYVFLVVKTLQAQLQVTNLLEYLIDVEIARSDCRKPLSTNEICAIQENSKLKRKLSCSFLVGALPWNGEFTVMEKKC

SEQ ID NO: 321 - protein, 123 aa, Homo sapiens
ARKDPKKNETGVLRKLKPVNASNANVKQCLWFAMQEYNKESEDKYVFLVVKTLQAQLQVTNLLEYLIDVEIARSDCRKPLSTNEICAIQENSKLKRKLSCSFLVGALPWNGEFTVMEKKCEDA

SEQ ID NO: 322 - protein, 32 aa, Homo sapiens
THSSSCGHPILPTAPALRRRGGESTLPLAQGT

SEQ ID NO: 323 - protein, 126 aa, Homo sapiens
  SITE (43): n equals a,t,g, or c
SWACSVLTTRKTYLSSLSLLYSCMAKPXTLLPRWXLKALTGFNFLSTPVSFFFGSFLATRARGMVRRIRESHRHLGMVPWARGKVDSPPRRLRAGAVGRMGWPQLLLWVQESSSHTLPPVSVSPAL

SEQ ID NO: 324 - protein, 126 aa, Homo sapiens; identical to SEQ ID NO: 323
  SITE (28): Xaa equals any of the naturally occurring L-amino acids
  SITE (35): Xaa equals any of the naturally occurring L-amino acids

SEQ ID NO: 325 - protein, 44 aa, Homo sapiens
DSPDTEPGSSAGPTQRPSDNSHNEHAPASQGLKAEHLYILIGVS

SEQ ID NO: 326 - protein, 101 aa, Homo sapiens
HRQNQIKQGPPRSKDEEQKPQQRPDLAVDVLERTADKATVNGLPEKDRETDTSALAAGSSQEVTYAQLDHWALTQRTARAVSPQSTKPMAESITYAAVARH

SEQ ID NO: 327 - protein, 115 aa, Homo sapiens
MSPHPTALLGLVLCLAQTIHTQEEDLPRPSISAEPGTVIPLGSHVTFVCRGPVGVQTFRLERESRSTYNDTEDVSQASPSESEARFRIDSVSEGNAGPYRCIYYKPPKWSEQSDY

SEQ ID NO: 328 - protein, 18 aa, Homo sapiens
TALLGLVLCLAQTIHTQE

SEQ ID NO: 329 - protein, 14 aa, Homo sapiens
LPRPSISAEPGTVI

SEQ ID NO: 330 - protein, 15 aa, Homo sapiens
CRGPVGVQTFRLERE

SEQ ID NO: 331 - protein, 31 aa, Homo sapiens
VLERTADKATVNGLPEKDRETDTSALAAGSS

SEQ ID NO: 332 - protein, 35 aa, Homo sapiens
AGGPRAAHPVCLCLLQSSVLALVRLRPGCTAGTWA

SEQ ID NO: 333 - protein, 58 aa, Homo sapiens
VKEMPGLIAASIISPLNGLSRVTTGAAGERNLWRPGLPGHRARLLSWTHAEAVGQQSQ

SEQ ID NO: 334 - protein, 25 aa, Homo sapiens
LNGLSRVTTGAAGERNLWRPGLPGH

SEQ ID NO: 335 - protein, 52 aa, Homo sapiens
  SITE (8): Xaa equals any of the naturally occurring L-amino acids
VKETSGGXDSPDTEPGSSAGPTQRPSDNSHNEHAPASQGLKAEHLYILIGVS

SEQ ID NO: 336 - protein, 29 aa, Homo sapiens
TEPGSSAGPTQRPSDNSHNEHAPASQGLK

SEQ ID NO: 337 - protein, 53 aa, Homo sapiens
HRQNQIKQGPPRSKDEEQKPQQRPDLAVDVLERTADKATVNGLPEKDRETDTS

SEQ ID NO: 338 - protein, 29 aa, Homo sapiens
PRSKDEEQKPQQRPDLAVDVLERTADKAT

SEQ ID NO: 339 - protein, 48 aa, Homo sapiens
ALAAGSSQEVTYAQLDHWALTQRTARAVSPQSTKPMAESITYAAVARH

SEQ ID NO: 340 - protein, 22 aa, Homo sapiens
AQLDHWALTQRTARAVSPQSTK

SEQ ID NO: 341 - protein, 60 aa, Homo sapiens
MSPHPTALLGLVLCLAQTIHTQEEDLPRPSISAEPGTVIPLGSHVTFVCRGPVGVQTFRL

SEQ ID NO: 342 - protein, 31 aa, Homo sapiens
TIHTQEEDLPRPSISAEPGTVIPLGSHVTFV

SEQ ID NO: 343 - protein, 55 aa, Homo sapiens
ERESRSTYNDTEDVSQASPSESEARFRIDSVSEGNAGPYRCIYYKPPKWSEQSDY

SEQ ID NO: 344 - protein, 26 aa, Homo sapiens
DTEDVSQASPSESEARFRIDSVSEGN

SEQ ID NO: 345 - protein, 438 aa, Homo sapiens
MNTPNGNSLSAAELTCGMIMCLARQIPQATASMKDGKWERKKFMGTELNGKTLGILGLGRIGREVATRMQSFGMKTIGYDPIISPEVSASFGVQQLPLEEIWPLCDFITVHTPLLPSTTGLLNDNTFAQCKKGVRVVNCARGGIVDEGALLRALQSGQCAGAALDVFTEEPPRDRALVDHENVISCPHLGASTKEAQSRCGEEIAVQFVDMVKGKSLTGVVNAQALTSAFSPHTKPWIGLAEALGTLMRAWAGSPKGTIQVITQGTSLKNAGNCLSPAVIVGLLKEASKQADVNLVNAKLLVKEAGLNVTTSHSPAAPGEQGFGECLLAVALAGAPYQAVGLVQGTTPVLQGLNGAVFRPEVPLRRDLPLLLFRTQTSDPAMLPTMIGLLAEAGVRLLSYQTSLVSDGETWHVMGISSLLPSLEAWKQHVTEAFQFHF

SEQ ID NO: 346 - protein, 24 aa, Homo sapiens
MAFANLRKVLISDSLDPCCRKILQ

SEQ ID NO: 347 - protein, 18 aa, Homo sapiens
GGLQVVEKQNLSKEELIA

SEQ ID NO: 348 - protein, 29 aa, Homo sapiens
MCLARQIPQATASMKDGKWERKKFMGTEL

SEQ ID NO: 349 - protein, 29 aa, Homo sapiens
ALTSAFSPHTKPWIGLAEALGTLMRAWAG

SEQ ID NO: 350 - protein, 36 aa, Homo sapiens
EVPLRRDLPLLLFRTQTSDPAMLPTMIGLLAEAGVR

SEQ ID NO: 351 - protein, 23 aa, Homo sapiens
GNSLSAAELTCGMIMCLARQIPQ

SEQ ID NO: 352 - protein, 26 aa, Homo sapiens
TASMKDGKWERKKFMGTELNGKTLGI

SEQ ID NO: 353 - protein, 25 aa, Homo sapiens
TRMQSFGMKTIGYDPIISPEVSASF

SEQ ID NO: 354 - protein, 26 aa, Homo sapiens
EEIWPLCDFITVHTPLLPSTTGLLND

SEQ ID NO: 355 - protein, 23 aa, Homo sapiens
RVVNCARGGIVDEGALLRALQSG

SEQ ID NO: 356 - protein, 24 aa, Homo sapiens
EPPRDRALVDHENVISCPHLGAST

SEQ ID NO: 357 - protein, 26 aa, Homo sapiens
VDMVKGKSLTGVVNAQALTSAFSPHT

SEQ ID NO: 358 - protein, 24 aa, Homo sapiens
GTLMRAWAGSPKGTIQVITQGTSL

SEQ ID NO: 359 - protein, 25 aa, Homo sapiens
PAVIVGLLKEASKQADVNLVNAKLL

SEQ ID NO: 360 - protein, 25 aa, Homo sapiens
HSPAAPGEQGFGECLLAVALAGAPY

SEQ ID NO: 361 - protein, 27 aa, Homo sapiens
TPVLQGLNGAVFRPEVPLRRDLPLLLF

SEQ ID NO: 362 - protein, 28 aa, Homo sapiens
TSDPAMLPTMIGLLAEAGVRLLSYQTSL

SEQ ID NO: 363 - protein, 53 aa, Homo sapiens
  SITE (20): Xaa equals any of the naturally occurring L-amino acids
ACRSTLVDPKNSARAGERDXRILPSYSSAPGRTAASWLRYFYSQRPIPRPTPA

SEQ ID NO: 364 - protein, 27 aa, Homo sapiens
  SITE (14): Xaa equals any of the naturally occurring L-amino acids
VDPKNSARAGERDXRILPSYSSAPGRT

SEQ ID NO: 365 - protein, 14 aa, Homo sapiens
CRTVKALLFALPPR

SEQ ID NO: 366 - protein, 44 aa, Homo sapiens
MAFANLRKVLISDSLDPCCRKILQDGGLQVVEKQNLSKEELIAD

SEQ ID NO: 367 - protein, 25 aa, Homo sapiens
KVLISDSLDPCCRKILQDGGLQVVE

SEQ ID NO: 368 - protein, 25 aa, Homo sapiens
HEPSGPPDKAQDVHIHCILDPVQVK

SEQ ID NO: 369 - protein, 165 aa, Homo sapiens
  SITE (73): Xaa equals any of the naturally occurring L-amino acids
  SITE (76): Xaa equals any of the naturally occurring L-amino acids
ARAKWSPRQGSGCPHPLHPGPCAGEDVPTHAYSSFACHHFSNHHSSSLLRCVRRRRRRHRRCRRRCCNHQQRXQNXRQIPHSHSVFRNPHRSQKMSQLHRVPFFDQEDPDSYLEEEDNLPFPYPKYPRRGWGGFYQRAGLPPMWGCGATRVYPGQSATTLSLPVT

SEQ ID NO: 370 - protein, 26 aa, Homo sapiens
SGCPHPLHPGPCAGEDVPTHAYSSFA

SEQ ID NO: 371 - protein, 31 aa, Homo sapiens
VFRNPHRSQKMSQLHRVPFFDQEDPDSYLEE

SEQ ID NO: 372 - protein, 22 aa, Homo sapiens
YQRAGLPPMWGCGATRVYPGQS

SEQ ID NO: 373 - protein, 39 aa, Homo sapiens
WLSNPGGSGGALWFFCKEMKSGKQTMIKHVSIRDLSFGE

SEQ ID NO: 374 - protein, 118 aa, Homo sapiens
  SITE (79): Xaa equals any of the naturally occurring L-amino acids
  SITE (81): Xaa equals any of the naturally occurring L-amino acids
ISCTPKTPSAPMAAFLSPLSLSRLSLSPHFSLSSFLDLYYVDKNPSNLLSLLSIASPTRIILKKEARIRHSDQKSSSLXSXGVREFRNIHTLVILVPVTVTSLYQDPCYYLQTIFHLS

SEQ ID NO: 375 - protein, 26 aa, Homo sapiens
KTPSAPMAAFLSPLSLSRLSLSPHFS

SEQ ID NO: 376 - protein, 25 aa, Homo sapiens
NLLSLLSIASPTRIILKKEARIRHS

SEQ ID NO: 377 - protein, 176 aa, Homo sapiens
  SITE (64): Xaa equals any of the naturally occurring L-amino acids
  SITE (67): Xaa equals any of the naturally occurring L-amino acids
  SITE (102): Xaa equals any of the naturally occurring L-amino acids
  SITE (147): Xaa equals any of the naturally occurring L-amino acids
  SITE (163): Xaa equals any of the naturally occurring L-amino acids
RGDTMGAHHGETQPAKQTKAKLVMGRCRMPDVRLFQGVNLLKRHRMKQCVWKHLVNWLALYMWXIIXEKCDQTKRFHPLSWVSAIRQFIFLATASLSGPFSXTLHGPCELFTLFLRSKSSLRKVSYVYLTPTVVTSVKGSHSGVPGXLLLNDHEILKEELPRXAASLGVGQELLIL

SEQ ID NO: 378 - protein, 28 aa, Homo sapiens
AKQTKAKLVMGRCRMPDVRLFQGVNLLK

SEQ ID NO: 379 - protein, 27 aa, Homo sapiens
  SITE (24): Xaa equals any of the naturally occurring L-amino acids
LSWVSAIRQFIFLATASLSGPFSXTLH

SEQ ID NO: 380 - protein, 24 aa, Homo sapiens
  SITE (10): Xaa equals any of the naturally occurring L-amino acids
KGSHSGVPGXLLLNDHEILKEELP

SEQ ID NO: 381 - protein, 109 aa, Homo sapiens
  SITE (43): Xaa equals any of the naturally occurring L-amino acids
  SITE (73): Xaa equals any of the naturally occurring L-amino acids
  SITE (107): Xaa equals any of the naturally occurring L-amino acids
FGTRFLANLLLEEDNKFCADCQSKGPRWASWNIGVFICIRCAXIHRNLGVHISRVKSVNLDQWTQVQIQCMQXMGNGKANRLYEAYLPETFRRPQIDPAVEGFIRDXYE

SEQ ID NO: 382 - protein, 21 aa, Homo sapiens
EEDNKFCADCQSKGPRWASWN

SEQ ID NO: 383 - protein, 20 aa, Homo sapiens
  SITE (10): Xaa equals any of the naturally occurring L-amino acids
GVFICIRCAXIHRNLGVHIS

SEQ ID NO: 384 - protein, 23 aa, Homo sapiens
  SITE (17): Xaa equals any of the naturally occurring L-amino acids
SVNLDQWTQVQIQCMQXMGNGKA

SEQ ID NO: 385 - protein, 245 aa, Homo sapiens
  SITE (93): Xaa equals any of the naturally occurring L-amino acids
MDLLGLDAPVACSIANSKTSNTLEKDLDLLASVPSPSSSGSRKVVGSMPTAGSAGSVPENLNLFPEPGSKSEEIGKKQLSKDSILSLYGSQTXQMPTQAMFMAPAQMAYPTAYPSFPGVTPPNSIMGSMMPPPVGMVAQPGASGMVAPMAMPAGYMGGMQASMMGVPNGMMTTQQAGYMAGMAAMPQTVYGVQPAQQLQWNLTQMTQQMAGMNFYGANGMMNYGQSMSGGNGQAANQTLSPQMWK

SEQ ID NO: 386 - protein, 315 aa, Homo sapiens
  SITE (93): Xaa equals any of the naturally occurring L-amino acids
  SITE (288): Xaa equals any of the naturally occurring L-amino acids
MDLLGLDAPVACSIANSKTSNTLEKDLDLLASVPSPSSSGSRKVVGSMPTAGSAGSVPENLNLFPEPGSKSEEIGKKQLSKDSILSLYGSQTXQMPTQAMFMAPAQMAYPTAYPSFPGVTPPNSIMGSMMPPPVGMVAQPGASGMVAPMAMPAGYMGGMQASMMGVPNGMMTTQQAGYMAGMAAMPQTVYGVQPAQQLQWNLTQMTQQMAGMNFYGANGMMNYGQSMSGGNGQAANQTLSPQMWKFGTRFLANLLLEEDNKFCADCQSKGPRWASWNIGVFICIRCAXIHRNLGVHISRVKSVNLDQWTQVQIQC

SEQ ID NO: 387 - protein, 39 aa, Homo sapiens
  SITE (3): Xaa equals any of the naturally occurring L-amino acids
  SITE (37): Xaa equals any of the naturally occurring L-amino acids
MQXMGNGKANRLYEAYLPETFRRPQIDPAVEGFIRDXYE

SEQ ID NO: 388 - protein, 78 aa, Homo sapiens
  SITE (11): Xaa equals any of the naturally occurring L-amino acids
TQLLKDLFETXMRRRNTWTEVWDINAFRKEKDDKWKRGSEPVPEKKLEPVVFEKVKMPQKKEDPQLPRKSSPKSTAPV

SEQ ID NO: 389 - protein, 209 aa, Homo sapiens
  SITE (160): Xaa equals any of the naturally occurring L-amino acids
  SITE (194): Xaa equals any of the naturally occurring L-amino acids
VWDPYSERMESLESCFLPISSDLLPGSGNRFRFSGTEPALPAVGMEPTTFLEPEEEGDGTEANRSKSFSRVLLVLLFAMEQATGASRPNKSMTGAVDFGELFRGSCGSSFFCGIFTFSKTTGSNFFSGTGSLPLFHLSSFSFLKALMSQTSVHVFLLLIXVSNKSFNSWVYLRSPKGLRKIGFIKSVCLSISHXLHALNLYLSPLVEVN

SEQ ID NO: 390 - protein, 26 aa, Homo sapiens
LESCFLPISSDLLPGSGNRFRFSGTE

SEQ ID NO: 391 - protein, 22 aa, Homo sapiens
GTEANRSKSFSRVLLVLLFAME

SEQ ID NO: 392 - protein, 24 aa, Homo sapiens
GTGSLPLFHLSSFSFLKALMSQTS

SEQ ID NO: 393 - protein, 23 aa, Homo sapiens
  SITE (16): Xaa equals any of the naturally occurring L-amino acids
RKIGFIKSVCLSISHXLHALNLY

SEQ ID NO: 394 - protein, 87 aa, Homo sapiens
LPFSLPFSRSADHSFMPVYPGCSVSPPFPGVRGRGPGQLSSQSLFTPLENSDKKTLLKRFHVWEPQFLAAFLLCMCKFLNKYCREGQ

SEQ ID NO: 395 - protein, 23 aa, Homo sapiens
MPVYPGCSVSPPFPGVRGRGPGQ

SEQ ID NO: 396 - protein, 70 aa, Homo sapiens
  SITE (43): Xaa equals any of the naturally occurring L-amino acids
FGTRFLANLLLEEDNKFCADCQSKGPRWASWNIGVFICIRCAXIHRNLGVHISRVKSVNLDQWTQVQIQC

SEQ ID NO: 397 - protein, 67 aa, Homo sapiens
KYGKVGKCVIFEIPGAPDDEAVRIFLEFERVESAIKAVVDLNGRYFGGRVVKACFYNLDKFRVLDLA

SEQ ID NO: 398 - protein, 12 aa, Homo sapiens
KAVDLGRYFGGR

SEQ ID NO: 399 - protein, 9 aa, Homo sapiens
EAVRIFFRE

SEQ ID NO: 400 - protein, 117 aa, Homo sapiens
GSRLAMSDMDGASPFPLVTRFPGDTPFSVASPTMILPPRLLVFSTDKAVLRPCSCFPRPWPSRKPYFCMILCATVPPMLARKELLGPVGDLGLSCSSYTGGGMAALEDCDRGLESSS

SEQ ID NO: 401 - protein, 25 aa, Homo sapiens
TRFPGDTPFSVASPTMILPPRLLVF

SEQ ID NO: 402 - protein, 26 aa, Homo sapiens
MILCATVPPMLARKELLGPVGDLGLS

SEQ ID NO: 403 - protein, 92 aa, Homo sapiens
  SITE (14): Xaa equals any of the naturally occurring L-amino acids
GTWLVRERWMKTWXVETKEECEKYGKVGKCVIFEIPGAPDDEAVRIFLEFERVESAIKAVVDLNGRYFGGRVVKACFYNLDKFRVLDLAEQV

SEQ ID NO: 404 - protein, 31 aa, Homo sapiens
EAVRIFLEFERVESAIKAVVDLNGRYFGGRV

SEQ ID NO: 405 - protein, 156 aa, Homo sapiens
AREEEKKYGRTAIAPPTSLVEKDKELPRDFPYEEDSRPRSQSSKAAIPPPVYEEQDRPRSPTGPSNSFLANMGGTVAHKIMQKYGFREGQGLGKHEQGLSTALSVEKTSKRGGKIIVGDATEKGVSPGKRVTRGKGLAPSISDMASLDPHVSAGGQ

SEQ ID NO: 406 - protein, 26 aa, Homo sapiens
LVEKDKELPRDFPYEEDSRPRSQSSK

SEQ ID NO: 407 - protein, 33 aa, Homo sapiens
LANMGGTVAHKIMQKYGFREGQGLGKHEQGLST

SEQ ID NO: 408 - protein, 23 aa, Homo sapiens
RVTRGKGLAPSISDMASLDPHVS

SEQ ID NO: 409 - protein, 46 aa, Homo sapiens
  SITE (45): Xaa equals any of the naturally occurring L-amino acids
GYITSLTDASKKSDSNPLTEILKCPTKVVLLRNMVGAGEVDEDLXS

SEQ ID NO: 410 - protein, 26 aa, Homo sapiens
SLTDASKKSDSNPLTEILKCPTKVVL

SEQ ID NO: 411 - protein, 306 aa, Homo sapiens
RMGRFHRILEPGLNILIPVLDRIRYVQSLKEIVINVPEQSAVTLDNVTLQIDGVLYLRIMDPYKASYGVEDPEYAVTQLAQTTMRSELGKLSLDKVFRERESLNASIVDAINQAADCWGIRCLRYEIKDIHVPPRVKESMQMQVEAERRKRATVLESEGTRESAINVAEGKKQAQILASEAEKAEQINQAAGEASAVLAKAKAKAEAIRILAAALTQHNGDAAASLTVAEQYVSAFSKLAKDSNTILLPSNPGDVTSMVAQAMGVYGALTKAPVPGTPDSLSSGSSRDVQGTDASLDEELDRVKMS

SEQ ID NO: 412 - protein, 26 aa, Homo sapiens
ASYGVEDPEYAVTQLAQTTMRSELGK

SEQ ID NO: 413 - protein, 27 aa, Homo sapiens
MQMQVEAERRKRATVLESEGTRESAIN

SEQ ID NO: 414 - protein, 26 aa, Homo sapiens
LTVAEQYVSAFSKLAKDSNTILLPSN

SEQ ID NO: 415 - protein, 70 aa, Homo sapiens
  SITE (28): Xaa equals any of the naturally occurring L-amino acids
LLGATAPLVSLVPEVAAAVGNAGARGAXHWGPFAEGLSTGFWPRSARASSGLPRNTVVLFVPQQEAWVVE

SEQ ID NO: 416 - protein, 60 aa, Homo sapiens
PRRASSGLPRNTVVLFVPQQEAWVVERMGRFHRILEPGLNILIPVLDRIRYVQSLKEIVI

SEQ ID NO: 417 - protein, 28 aa, Homo sapiens
VPQQEAWVVERMGRFHRILEPGLNILIP

SEQ ID NO: 418 - protein, 60 aa, Homo sapiens
NVPEQSAVTLDNVTLQIDGVLYLRIMDPYKASYGVEDPEYAVTQLAQTTMRSELGKLSLD

SEQ ID NO: 419 - protein, 30 aa, Homo sapiens
IDGVLYLRIMDPYKASYGVEDPEYAVTQLA

SEQ ID NO: 420 - protein, 50 aa, Homo sapiens
KVFRERESLNASIVDAINQAADCWGIRCLRYEIKDIHVPPRVKESMQMQV

SEQ ID NO: 421 - protein, 25 aa, Homo sapiens
ASIVDAINQAADCWGIRCLRYEIKD

SEQ ID NO: 422 - protein, 45 aa, Homo sapiens
EAERRKRATVLESEGTRESAINVAEGKKQAQILASEAEKAEQINQ

SEQ ID NO: 423 - protein, 24 aa, Homo sapiens
LESEGTRESAINVAEGKKQAQILA

SEQ ID NO: 424 - protein, 45 aa, Homo sapiens
TQHNGDAAASLTVAEQYVSAFSKLAKDSNTILLPSNPGDVTSMVA

SEQ ID NO: 425 - protein, 24 aa, Homo sapiens
LTVAEQYVSAFSKLAKDSNTILLP

SEQ ID NO: 426 - protein, 46 aa, Homo sapiens
QAMGVYGALTKAPVPGTPDSLSSGSSRDVQGTDASLDEELDRVKMS

SEQ ID NO: 427 - protein, 26 aa, Homo sapiens
KAPVPGTPDSLSSGSSRDVQGTDASL

SEQ ID NO: 428 - protein, 30 aa, Homo sapiens
  SITE (13): Xaa equals any of the naturally occurring L-amino acids
AAAVGNAGARGAXHWGPFAEGLSTGFWPRS

SEQ ID NO: 429 - protein, 29 aa, Homo sapiens
  SITE (8): Xaa equals any of the naturally occurring L-amino acids
NAGARGAXHWGPFAEGLSTGFWPRSARAS

SEQ ID NO: 430 - protein, 25 aa, Homo sapiens
STHASGATSLLRSSRWFRRSLRRWE

SEQ ID NO: 431 - protein, 46 aa, Homo sapiens
RMWRNGTHFWECKIVQPLWKTVWWFPRKLSIELPENLAILIGTYFK

SEQ ID NO: 432 - protein, 33 aa, Homo sapiens
LKRHFPKEANKHVKRCSTSLDIREIQIKIKMRY

SEQ ID NO: 433 - protein, 14 aa, Homo sapiens
HVLVRMWRNGTHFW

SEQ ID NO: 434 - protein, 33 aa, Homo sapiens
  SITE (22): Xaa equals any of the naturally occurring L-amino acids
  SITE (23): Xaa equals any of the naturally occurring L-amino acids
  SITE (24): Xaa equals any of the naturally occurring L-amino acids
  SITE (25): Xaa equals any of the naturally occurring L-amino acids
  SITE (32): Xaa equals any of the naturally occurring L-amino acids
GTSGSYYLMWPIGLKPITIKEXXXXTTSNSIXK

SEQ ID NO: 435 - protein, 43 aa, Homo sapiens
AKNLKRHFPKEANKHVKRCSTSLDIREIQIKIKMRYQFILRWL

SEQ ID NO: 436 - protein, 34 aa, Homo sapiens
TMWYIPRGEYYSALKRNEVLVHATKVDEPQKHAE

SEQ ID NO: 437 - protein, 23 aa, Homo sapiens
PKEANKHVKRCSTSLDIREIQIK

SEQ ID NO: 438 - protein, 81 aa, Homo sapiens
VEMRRWPPSKNFTFTSSLSLSSLTALLQEKLLLSVSRRHAALSVCVLTHHLDGRILVTTETTFYKSKLKGTASSSVLGRGG

SEQ ID NO: 439 - protein, 22 aa, Homo sapiens
PPSKNFTFTSSLSLSSLTALLQ

SEQ ID NO: 440 - protein, 21 aa, Homo sapiens
DGRILVTTETTFYKSKLKGTA

SEQ ID NO: 441 - protein, 7 aa, Homo sapiens
VENSRKA

SEQ ID NO: 442 - protein, 328 aa, Homo sapiens
GTRPGESHANDLECSGKGKCTTKPSEATFSCTCEEQYVGTFCEEYDACQRKPCQNNASCIDANEKQDGSNFTCVCLPGYTGELCQSKIDYCILDPCRNGATCISSLSGFTCQCPEGYFGSACEEKVDPCASSPCQNNGTCYVDGVHFTCNCSPGFTGPTCAQLIDFCALSPCAHGTCRSVGTSYKCLCDPGYHGLYCEEEYNECLSAPCLNAATCRDLVNGYECVCLAEYKGTHCELYKDPCANVSCLNGATCDSDGLNGTCICAPGFTGEECDIDINECDSNPCHHGGSCLDQPNGYNCHCPHGWVGANCEIHLQWKSGHMAESLTN

SEQ ID NO: 443 - protein, 25 aa, Homo sapiens
GKCTTKPSEATFSCTCEEQYVGTFC

SEQ ID NO: 444 - protein, 22 aa, Homo sapiens
CAHGTCRSVGTSYKCLCDPGYH

SEQ ID NO: 445 - protein, 33 aa, Homo sapiens
CANVSCLNGATCDSDGLNGTCICAPGFTGEECD

SEQ ID NO: 446 - protein, 27 aa, Homo sapiens
HANDLECSGKGKCTTKPSEATFSCTCE

SEQ ID NO: 447 - protein, 26 aa, Homo sapiens
YVGTFCEEYDACQRKPCQNNASCIDA

SEQ ID NO: 448 - protein, 23 aa, Homo sapiens
GYTGELCQSKIDYCILDPCRNGA

SEQ ID NO: 449 - protein, 25 aa, Homo sapiens
CPEGYFGSACEEKVDPCASSPCQNN

SEQ ID NO: 450 - protein, 22 aa, Homo sapiens
CSPGFTGPTCAQLIDFCALSPC

SEQ ID NO: 451 - protein, 25 aa, Homo sapiens
GTCRSVGTSYKCLCDPGYHGLYCEE

SEQ ID NO: 452 - protein, 26 aa, Homo sapiens
DQPNGYNCHCPHGWVGANCEIHLQWK

SEQ ID NO: 453 - protein, 14 aa, Homo sapiens
PPFRLQGDWSSWRE

SEQ ID NO: 454 - protein, 116 aa, Homo sapiens
THAEMEQHAFPVSVDSPASVQKDTSDLLVKKRWTPAPRLRARTTAPAMWTGYTLPATAARASQGRPVPSLLTSVPSAPVLMARAAAWAPATNASVIQVTMASTVRRNIMSASPLHA

SEQ ID NO: 455 - protein, 22 aa, Homo sapiens
EQHAFPVSVDSPASVQKDTSDL

SEQ ID NO: 456 - protein, 22 aa, Homo sapiens
PAPRLRARTTAPAMWTGYTLPA

SEQ ID NO: 457 - protein, 19 aa, Homo sapiens
VPSLLTSVPSAPVLMARAA

SEQ ID NO: 458 - protein, 21 aa, Homo sapiens
VIQVTMASTVRRNIMSASPLH

SEQ ID NO: 459 - protein, 35 aa, Homo sapiens
EMLALGNNHFIGFVNDSVTKSIVALRLTLVVKVST

SEQ ID NO: 460 - protein, 60 aa, Homo sapiens
SGKGKCTTKPSEATFSCTCEEQYVGTFCEEYDACQRKPCQNNASCIDANEKQDGSNFTCV

SEQ ID NO: 461 - protein, 31 aa, Homo sapiens
ATFSCTCEEQYVGTFCEEYDACQRKPCQNNA

SEQ ID NO: 462 - protein, 60 aa, Homo sapiens
CLPGYTGELCQSKIDYCILDPCRNGATCISSLSGFTCQCPEGYFGSACEEKVDPCASSPC

SEQ ID NO: 463 - protein, 28 aa, Homo sapiens
YCILDPCRNGATCISSLSGFTCQCPEGY

SEQ ID NO: 464 - protein, 60 aa, Homo sapiens
QNNGTCYVDGVHFTCNCSPGFTGPTCAQLIDFCALSPCAHGTCRSVGTSYKCLCDPGYHG

SEQ ID NO: 465 - protein, 27 aa, Homo sapiens
CNCSPGFTGPTCAQLIDFCALSPCAHG

SEQ ID NO: 466 - protein, 60 aa, Homo sapiens
LYCEEEYNECLSAPCLNAATCRDLVNGYECVCLAEYKGTHCELYKDPCANVSCLNGATCD

SEQ ID NO: 467 - protein, 24 aa, Homo sapiens
PCLNAATCRDLVNGYECVCLAEYK

SEQ ID NO: 468 - protein, 60 aa, Homo sapiens
  SITE (46): Xaa equals any of the naturally occurring L-amino acids
SDGLNGTCICAPGFTGEECDIDINECDSNPCHHGGSCLDQPNGYNXHCPHGWVGANCEIH

SEQ ID NO: 469 - protein, 23 aa, Homo sapiens
GEECDIDINECDSNPCHHGGSCL

SEQ ID NO: 470 - protein, 58 aa, Homo sapiens
FYNCRSIDSEFSNAIASIRHARFGKKSRPAMYDVSPIAYEDYSPDDKPLVTLIKTKDL

SEQ ID NO: 471 - protein, 27 aa, Homo sapiens
ASIRHARFGKKSRPAMYDVSPIAYEDY

SEQ ID NO: 472 - protein, 24 aa, Homo sapiens
QQCSLIDGRSVTPLQASGGLVLLE

SEQ ID NO: 473 - protein, 40 aa, Homo sapiens
PNGSSNVCVSLCVFVCVCALKTSNSLEAWGGIPALPLACL

SEQ ID NO: 474 - protein, 23 aa, Homo sapiens
LCVFVCVCALKTSNSLEAWGGIP

SEQ ID NO: 475 - protein, 299 aa, Homo sapiens
MAQNLKDLAGRLPAGPRGMGTALKLLLGAGAVAYGVRESVFTVEGGHRAIFFNRIGGVQQDTILAEGLHFRIPWFQYPIIYDIRARPRKISSPTGSKDLQMVNISLRVLSRPNAQELPSMYQRLGLDYEERVLPSIVNEVLKSVVAKFNASQLITQRAQVSLLIRRELTERAKDFSLILDDVAITELSFSREYTAAVEAKQVAQQEAQRAQFLVEKAKQEQRQKIVQAEGEAEAAKMLGEALSKNPGYIKLRKIRAAQNISKTIATSQNRIYLTADNLVLNLQDESFTRGSDSLIKGKK

SEQ ID NO: 476 - protein, 10 aa, Homo sapiens
PPVPPASRSD

SEQ ID NO: 477 - protein, 17 aa, Homo sapiens
MAQNLKDLAGRLPAGPR

SEQ ID NO: 478 - protein, 27 aa, Homo sapiens
YGVRESVFTVEGGHRAIFFNRIGGVQQ

SEQ ID NO: 479 - protein, 60 aa, Homo sapiens
DTILAEGLHFRIPWFQYPIIYDIRARPRKISSPTGSKDLQMVNISLRVLSRPNAQELPSM

SEQ ID NO: 480 - protein, 29 aa, Homo sapiens
WFQYPIIYDIRARPRKISSPTGSKDLQMV

SEQ ID NO: 481 - protein, 60 aa, Homo sapiens
YQRLGLDYEERVLPSIVNEVLKSVVAKFNASQLITQRAQVSLLIRRELTERAKDFSLILD

SEQ ID NO: 482 - protein, 26 aa, Homo sapiens
VNEVLKSVVAKFNASQLITQRAQVSL

SEQ ID NO: 483 - protein, 14 aa, Homo sapiens
DVAITELSFSREYT

SEQ ID NO: 484 - protein, 29 aa, Homo sapiens
FLVEKAKQEQRQKIVQAEGEAEAAKMLGE

SEQ ID NO: 485 - protein, 59 aa, Homo sapiens
ALSKNPGYIKLRKIRAAQNISKTIATSQNRIYLTADNLVLNLQDESFTRGSDSLIKGKK

SEQ ID NO: 486 - protein, 27 aa, Homo sapiens
KIRAAQNISKTIATSQNRIYLTADNLV

SEQ ID NO: 487 - protein, 18 aa, Homo sapiens
KALALSFHGWSGTGKNFV

SEQ ID NO: 488 - protein, 22 aa, Homo sapiens
NLIDYFIPFLPLEYRHVRLCAR

SEQ ID NO: 489 - protein, 20 aa, Homo sapiens
NLIDYFIPFLPLEYRHVRLC

SEQ ID NO: 490 - protein, 26 aa, Homo sapiens
CHQTLFIFDEAEKLHPGLLEVLGPHL

SEQ ID NO: 491 - protein, 21 aa, Homo sapiens
PEKALALSFHGWSGTGKNFVA

SEQ ID NO: 492 - protein, 17 aa, Homo sapiens
GSLARPAAGWSRSSGPA

SEQ ID NO: 493 - protein, 80 aa, Homo sapiens
DAKETIWSVIISPWDLLSSHMAFFNHLAHFLQPHSTLECVSLRHQVILRMGSVFEFSNPSSYLSRWDLQKKEKGLAWLLM

SEQ ID NO: 494 - protein, 27 aa, Homo sapiens
NHLAHFLQPHSTLECVSLRHQVILRMG

SEQ ID NO: 495 - protein, 119 aa, Homo sapiens
MSRPPIVFEKVPPPPPKSVDHKSWPTLTWFVKYLPLCTFPFSLRLLADSLTTEAAWLSSGSTNLKAHQPANLECILHPWVTELRSPRLCNPRTLQPLRPNTQALPCRRAEMLRRPSGVS

SEQ ID NO: 496 - protein, 30 aa, Homo sapiens
HQPANLECILHPWVTELRSPRLCNPRTLQP

SEQ ID NO: 497 - protein, 28 aa, Homo sapiens
  SITE (3): Xaa equals any of the naturally occurring L-amino acids
NSXRAWRRHVPCGGGREIAWTSGRPRTA

SEQ ID NO: 498 - protein, 119 aa, Homo sapiens
  SITE (80): Xaa equals any of the naturally occurring L-amino acids
  SITE (117): Xaa equals any of the naturally occurring L-amino acids
VSIFSTDIHPNNKSNTIAIEFTIINGTLITVLTDRIRFISCDLIPGSSPNPPIPWSVPQPMFLRNRSSCSTAMALTQSRXACSSEYRVKAMAVRGRPEVQAISLPPPQGTWRLHARXEF

SEQ ID NO: 499 - protein, 30 aa, Homo sapiens
  SITE (22): Xaa equals any of the naturally occurring L-amino acids
QPMFLRNRSSCSTAMALTQSRXACSSEYRV

SEQ ID NO: 500 - protein, 49 aa, Homo sapiens
  SITE (28): Xaa equals any of the naturally occurring L-amino acids
  SITE (30): Xaa equals any of the naturally occurring L-amino acids
KLPRERCGRMKWRQHEFLSPCHMFSFPXLXSKRVRYIFCNSDNFLPLCR

SEQ ID NO: 501 - protein, 23 aa, Homo sapiens
NLKEKIFISFAWLPKATVQAAIG

SEQ ID NO: 502 - protein, 17 aa, Homo sapiens
WLPKATVQAAIGSVALD

SEQ ID NO: 503 - protein, 59 aa, Homo sapiens
  SITE (49): Xaa equals any of the naturally occurring L-amino acids
VLIRILTTFLMVCFAGFNLKEKIFISFAWLPKATVQAAIGSVALDTARXHGEKQLEDYG

SEQ ID NO: 504 - protein, 34 aa, Homo sapiens
FLMVCFAGFNLKEKIFISFAWLPKATVQAAIGSV

SEQ ID NO: 505 - protein, 74 aa, Homo sapiens
LKRKDIYFFCMASKGHSSGCNRICGFGHSKVTWRETIRRLWNGCVDSGIFVHPHHSPNWKSAYWFTGPQASAES

SEQ ID NO: 506 - protein, 26 aa, Homo sapiens
GHSSGCNRICGFGHSKVTWRETIRRL

SEQ ID NO: 507 - protein, 115 aa, Homo sapiens
TAFLALALSMWVVMIYITNLNLSAFFFKHPFIIHLNLHKDISTLMYYHSLQLMWERPASVSSSARIALTFNFHSFLIHICPGSDALNWFWLSFLDLFLLLNIIMQSLINFYHHLP

SEQ ID NO: 508 - protein, 24 aa, Homo sapiens
LSAFFFKHPFIIHLNLHKDISTLM

SEQ ID NO: 509 - protein, 24 aa, Homo sapiens
HICPGSDALNWFWLSFLDLFLLLN

SEQ ID NO: 510 - protein, 65 aa, Homo sapiens
RAGGQGACTHAKGSETPPPASPQTSEPAPSPLPPHLTGGPGMYSSEAKLPNSFSCLGLAGTGAGI

SEQ ID NO: 511 - protein, 28 aa, Homo sapiens
GSETPPPASPQTSEPAPSPLPPHLTGGP

SEQ ID NO: 512 - protein, 122 aa, Homo sapiens
PVAAGCLPHQPLKGWGAGGMHPCKRLRNSPSGKPSDFGACAFPPTASPHRRARHVFLRGETAKLFLLSWVGWHWGGHLGYSLCSWHWASSSSTCVHPQLGQPSALRWGPKHLPFRLASLGLG

SEQ ID NO: 513 - protein, 33 aa, Homo sapiens
LRNSPSGKPSDFGACAFPPTASPHRRARHVFLR

SEQ ID NO: 514 - protein, 11 aa, Homo sapiens
FFTWRTYLPLD

SEQ ID NO: 515 - protein, 9 aa, Homo sapiens
LQVYIQMHR

SEQ ID NO: 516 - protein, 61 aa, Homo sapiens
KFIQNKDCQRMLNLGRGRFDGGTELSNKVSKFLLTNYPLIAKGKTITIHWRNWTSYPSDQN

SEQ ID NO: 517 - protein, 28 aa, Homo sapiens
RGRFDGGTELSNKVSKFLLTNYPLIAKG

SEQ ID NO: 518 - protein, 18 aa, Homo sapiens
HDRTMQDIVYKLVPGLQE

SEQ ID NO: 519 - protein, 23 aa, Homo sapiens
FASHDRTMQDIVYKLVPGLQEGE

SEQ ID NO: 520 - protein, 11 aa, Homo sapiens
GTGSFASHDRT

SEQ ID NO: 521 - protein, 32 aa, Homo sapiens
PRSRPALRPGRQRPPSHSATSGVLRPRKKPDP

SEQ ID NO: 522 - protein, 127 aa, Homo sapiens
  SITE (55): Xaa equals any of the naturally occurring L-amino acids
  SITE (76): Xaa equals any of the naturally occurring L-amino acids
  SITE (92): Xaa equals any of the naturally occurring L-amino acids
SLRSQPGLCSPCSPGSLVLGWEAPFLLAESPSSHPCSQPNFISLAGLFFRLRCVXIFLPLMCIHSASMDRMFSTWXPQGSTQLLPLPGPCLXPGPHLLSQACLPSSHSASFPTTEEQHVGIAGSWCF

SEQ ID NO: 523 - protein, 37 aa, Homo sapiens
CSPCSPGSLVLGWEAPFLLAESPSSHPCSQPNFISLA

SEQ ID NO: 524 - protein, 17 aa, Homo sapiens
LVLSLGAWGWPSTCLWW

SEQ ID NO: 525 - protein, 8 aa, Homo sapiens
GWQNAYRD

SEQ ID NO: 526 - protein, 176 aa, Homo sapiens
  SITE (10): Xaa equals any of the naturally occurring L-amino acids
  SITE (98): Xaa equals any of the naturally occurring L-amino acids
  SITE (99): Xaa equals any of the naturally occurring L-amino acids
LHLKHWPSLXKLQEAVGKVIINATTCTVTCGLGYKEETVCEVGPDGVRRKCQTRRLECLTNWICGMLHFTILIGKEFELSCLSSDILEFGQEAFRFTXXLARGVISTDDEVFKPFQANSHFVKFKYAQEYDSGTYRCDVQLVKNLRLVKRLYFGLRVLPPNLVNLNFHQSLTEDQD

SEQ ID NO: 527 - protein, 47 aa, Homo sapiens
ANSHFVKFKYAQEYDSGTYRCDVQLVKNLRLVKRLYFGLRVLPPNLV

SEQ ID NO: 528 - protein, 85 aa, Homo sapiens
  SITE (71): Xaa equals any of the naturally occurring L-amino acids
  SITE (72): Xaa equals any of the naturally occurring L-amino acids
LMEIQIHQVRRKDPQPKIEPLDESQVFYQLHITAICPRVILLSIFKLHKVGVGLKGFEDLIVSGDDTSSKXXGEPESFLSKLQDV

SEQ ID NO: 529 - protein, 27 aa, Homo sapiens
LDESQVFYQLHITAICPRVILLSIFKL

SEQ ID NO: 530 - protein, 6 aa, Homo sapiens
NSARED

SEQ ID NO: 531 - protein, 136 aa, Homo sapiens
EGTGTRFGLACSLPASHALLRPGSESRLLPVMPPIQEPRFFSKTRPVPFSTAASQQRAPGSPRSQLWLWTTWLRPLGLQSLHWVYLGLIHSWSQGWGFTCEHQTDLLASRAVDSLMKALVRRKHSVLRLLCNRFVI

SEQ ID NO: 532 - protein, 30 aa, Homo sapiens
PPIQEPRFFSKTRPVPFSTAASQQRAPGSP

SEQ ID NO: 533 - protein, 24 aa, Homo sapiens
TCEHQTDLLASRAVDSLMKALVRR

SEQ ID NO: 534 - protein, 108 aa, Homo sapiens
  SITE (98): Xaa equals any of the naturally occurring L-amino acids
  SITE (107): Xaa equals any of the naturally occurring L-amino acids
QCKLCNPRGRSHVVQSHSWDLGDPGALCWEAAVEKGTGRVLLKNRGSCMGGITGRRRLSLPGLSRAWLAGRLHASPNRVPVPSHRADGSCGSHGEGEXLGALLRSRXL

SEQ ID NO: 535 - protein, 32 aa, Homo sapiens
MGGITGRRRLSLPGLSRAWLAGRLHASPNRVP

SEQ ID NO: 536 - protein, 15 aa, Homo sapiens
WRYSVFFFSFKQRKK

SEQ ID NO: 537 - protein, 15 aa, Homo sapiens
QGKLQMWVDVFPKSL

SEQ ID NO: 538 - protein, 16 aa, Homo sapiens
PPFNITPRKAKKYYLR

SEQ ID NO: 539 - protein, 19 aa, Homo sapiens
KTDVHYRSLDGEGNFNWRF

SEQ ID NO: 540 - protein, 26 aa, Homo sapiens
PRLIIQIWDNDKFSLDDYLGFLELDL

SEQ ID NO: 541 - protein, 281 aa, Homo sapiens
PEFPGVFDPSGTLHSTFQPNISQGKLQMWVDVFPKSLGPPGPPFNITPRKAKKYYLRVIIWNTKDVILDEKSITGEEMSDIYVKGWIPGNEENKQKTDVHYRSLDGEGNFNWRFVFPFDYLPAEQLCIVAKKEHFWSIDQTEFRIPPRLIIQIWDNDKFSLDDYLGFLELDLRHTIIPAKSPEKCRLDMIPDLKAMNPLKAKTASLFEQKSMKGWWPCYAEKDGARVMAGKVEMTLEILNEKEADERPAGKGRDEPNMNPKLDLPNRPETSFLWFTNPCKT

SEQ ID NO: 542 - protein, 28 aa, Homo sapiens
QGKLQMWVDVFPKSLGPPGPPFNITPRK

SEQ ID NO: 543 - protein, 34 aa, Homo sapiens
VHYRSLDGEGNFNWRFVFPFDYLPAEQLCIVAKK

SEQ ID NO: 544 - protein, 30 aa, Homo sapiens
FSLDDYLGFLELDLRHTIIPAKSPEKCRLD

SEQ ID NO: 545 - protein, 28 aa, Homo sapiens
PAGKGRDEPNMNPKLDLPNRPETSFLWF

SEQ ID NO: 546 - protein, 82 aa, Homo sapiens
AEVHERMVAMLRRERWRPRNGWESGDDIGNPQREGGRREASREGAGRTQHEPQAGLTKSTRNLLPLVHQPMQDHEVHRVAPL

SEQ ID NO: 547 - protein, 30 aa, Homo sapiens
GDDIGNPQREGGRREASREGAGRTQHEPQA

SEQ ID NO: 548 - protein, 167 aa, Homo sapiens
ETQVVIQRKLVIVPYLNDQPGWDSKFRLVNTPEMLFFRNDTELFGWKVVKRENKSPVKIPFTIQRSVMDICFLFVFFIARNPAFDVDVTHFLSCDAFLVQDNVLGVPDDHTQVVFLGFPGCDVERRAWWPQTLGENIHPHLKFSLGNVGLEGAVQSPGRVEHTREFR

SEQ ID NO: 549 - protein, 29 aa, Homo sapiens
FFRNDTELFGWKVVKRENKSPVKIPFTIQ

SEQ ID NO: 550 - protein, 29 aa, Homo sapiens
QVVFLGFPGCDVERRAWWPQTLGENIHPH

SEQ ID NO: 551 - protein, 55 aa, Homo sapiens
LPPQAWRRRPRSPAAPQPFNDSIEWSGYNKPERKGPLALFLVFLFLDTPPLQGDL

SEQ ID NO: 552 - protein, 21 aa, Homo sapiens
LLGMSLLWLFLSLIPLRNQPL

SEQ ID NO: 553 - protein, 15 aa, Homo sapiens
AVMIGDDCRDDVGGA

SEQ ID NO: 554 - protein, 17 aa, Homo sapiens
ILVKTGKYRASDEEKIN

SEQ ID NO: 555 - protein, 25 aa, Homo sapiens
EFPSCCGPHSAAPIVKQCVHLKQLE

SEQ ID NO: 556 - protein, 64 aa, Homo sapiens
PEEAVMIGDDCRDDVGGAQDVGMLGILVKTGKYRASDEEKINPPPYLTCESFPHAVDHILQHLL

SEQ ID NO: 557 - protein, 31 aa, Homo sapiens
RDDVGGAQDVGMLGILVKTGKYRASDEEKIN

SEQ ID NO: 558 - protein, 28 aa, Homo sapiens
QALYLDLLLRSAFCLILFSGCFQGLSSV

SEQ ID NO: 559 - protein, 105 aa, Homo sapiens
  SITE (10): Xaa equals any of the naturally occurring L-amino acids
VQAFCQQQVXSESHPPAQSRSRKRMNMSECSPGRLGLTRTGFCQHGDSLLCRWGRERSPNVPPMGSSRNWALEYCWPQWTFIQGVLWSSLPDACPVLPLCHRPFG

SEQ ID NO: 560 - protein, 33 aa, Homo sapiens
NVPPMGSSRNWALEYCWPQWTFIQGVLWSSLPD

SEQ ID NO: 561 - protein, 85 aa, Homo sapiens
TCLSVPLEGWALQGQASVSMVTVFCVDGGGREVPMCHPWDPAETGLWSIAGPSGLSSKEFFGLHCQMPVQFCHCVIGHLADLFLY

SEQ ID NO: 562 - protein, 33 aa, Homo sapiens
HPWDPAETGLWSIAGPSGLSSKEFFGLHCQMPV

SEQ ID NO: 563 - protein, 32 aa, Homo sapiens
  SITE (9): Xaa equals any of the naturally occurring L-amino acids
QSRAGQRGXALPTRTKAPSLRALLRAVSPGAP

SEQ ID NO: 564 - protein, 179 aa, Homo sapiens
KLVVCFTLFLSKGFSIIVWTVLKVTGSVAHSFAFTVLPSILWDWVVTFPHRVLDSSTARSRTVSPRPPHSPASMKRRIKMLSVGFVHTLAVDTPFPFSTAGAIRPREVFGLTHQHPTRGAGTPQGATCAGCIRAVFGVLPKCKLALPVGIVRGAREIAWELYGILRLVHQTFPMTIIQK

SEQ ID NO: 565 - protein, 31 aa, Homo sapiens
TLAVDTPFPFSTAGAIRPREVFGLTHQHPTR

SEQ ID NO: 566 - protein, 9 aa, Homo sapiens
FLAPGFTLQ

SEQ ID NO: 567 - protein, 14 aa, Homo sapiens
DLAHCFYSGTVNGD

SEQ ID NO: 568 - protein, 17 aa, Homo sapiens
SAAALSLCEGVRGAFYL

SEQ ID NO: 569 - protein, 14 aa, Homo sapiens
RYVETMLVADQSMA

SEQ ID NO: 570 - protein, 19 aa, Homo sapiens
FHGSGLKHYLLTLFSVAAR

SEQ ID NO: 571 - protein, 19 aa, Homo sapiens
EQKGPEVTSNAALTLRNFC

SEQ ID NO: 572 - protein, 17 aa, Homo sapiens
EHYDTAILFTRQDLCGS

SEQ ID NO: 573 - protein, 44 aa, Homo sapiens
MADVGTVCDPSRSCSVIEDDGLQAAFTTAHELGHVFNMPHDDAK

SEQ ID NO: 574 - protein, 14 aa, Homo sapiens
LDHSQPWSPCSAYM

SEQ ID NO: 575 - protein, 20 aa, Homo sapiens
TSFLDNGHGECLMDKPQNPI

SEQ ID NO: 576 - protein, 10 aa, Homo sapiens
YDANRQCQFT

SEQ ID NO: 577 - protein, 11 aa, Homo sapiens
SKHCPDAASTC

SEQ ID NO: 578 - protein, 10 aa, Homo sapiens
TLWCTGTSGG

SEQ ID NO: 579 - protein, 22 aa, Homo sapiens
LVCQTKHFPWADGTSCGEGKWC

SEQ ID NO: 580 - protein, 45 aa, Homo sapiens
WGPWGDCSRTCGGGVQYTMRECDNPVPKNGGKYCEGKRVRYRSCN

SEQ ID NO: 581 - protein, 27 aa, Homo sapiens
DCPDNNGKTFREEQCEAHNEFSKASFG

SEQ ID NO: 582 - protein, 14 aa, Homo sapiens
PKYAGVSPKDRCKL

SEQ ID NO: 583 - protein, 8 aa, Homo sapiens
AKGIGYFF

SEQ ID NO: 584 - protein, 55 aa, Homo sapiens
VLQPKVVDGTPCSPDSTSVCVQGQCVKAGCDRIIDSKKKFDKCGVCGGNGSTCKK

SEQ ID NO: 585 - protein, 15 aa, Homo sapiens
RNQRGSRNNGSFLAI

SEQ ID NO: 586 - protein, 8 aa, Homo sapiens
GATNIEVK

SEQ ID NO: 587 - protein, 10 aa, Homo sapiens
AADGTYILNG

SEQ ID NO: 588 - protein, 29 aa, Homo sapiens
VLRYSGSSAALERIRSFSPLKEPLTIQVL

SEQ ID NO: 589 - protein, 11 aa, Homo sapiens
WVIEEWGECSK

SEQ ID NO: 590 - protein, 19 aa, Homo sapiens
PASECAKEVKPASTRPCAD

SEQ ID NO: 591 - protein, 12 aa, Homo sapiens
CSKTCGKGYKKR

SEQ ID NO: 592 - protein, 11 aa, Homo sapiens
ESCDPLKKPKH

SEQ ID NO: 593 - protein, 99 aa, Homo sapiens
THASGQESLYKICKAYSVYDEDIGYCQGQSFLAAVLLLHMPEEQAFCVLVKIMYDYGLRDLYRNNFEDLHCKFYQLERLMQEQLPDLHSHFSDLNLEAH

SEQ ID NO: 594 - protein, 24 aa, Homo sapiens
YSVYDEDIGYCQGQSFLAAVLLLH

SEQ ID NO: 595 - protein, 26 aa, Homo sapiens
LYRNNFEDLHCKFYQLERLMQEQLPD

SEQ ID NO: 596 - protein, 207 aa, Homo sapiens
  SITE (13): Xaa equals any of the naturally occurring L-amino acids
  SITE (153): Xaa equals any of the naturally occurring L-amino acids
  SITE (161): Xaa equals any of the naturally occurring L-amino acids
QKMYETMKLDACXHQQRPTLQAGPKLLTLAPREEPRGQSGRGSELTARQRHSTGDPQGEQALPRAGCVTGPPATPHRPSEPQLLRTHPDARPKSAMAQTFVHQGPVALQQLTTNRRVETSMSSDGHGQNPTPSPWADVCASRADAVAFPASGXCHSPWLMXPSSHPLNPHSPLNLPPPSFHCKDPVMTLHPQTLVTQGHLSTSGRLT

SEQ ID NO: 597 - protein, 28 aa, Homo sapiens
GPKLLTLAPREEPRGQSGRGSELTARQR

SEQ ID NO: 598 - protein, 29 aa, Homo sapiens
PKSAMAQTFVHQGPVALQQLTTNRRVETS

SEQ ID NO: 599 - protein, 29 aa, Homo sapiens
  SITE (12): Xaa equals any of the naturally occurring L-amino acids
  SITE (20): Xaa equals any of the naturally occurring L-amino acids
RADAVAFPASGXCHSPWLMXPSSHPLNPH

SEQ ID NO: 600 - protein, 28 aa, Homo sapiens
PPSFHCKDPVMTLHPQTLVTQGHLSTSG

SEQ ID NO: 601 - protein, 277 aa, Homo sapiens
  SITE (119): Xaa equals any of the naturally occurring L-amino acids
  SITE (134): Xaa equals any of the naturally occurring L-amino acids
MDSMPEPASRCLLLLPLLLLLLLLLPAPELGPSQAGAEENDWVRLPSKCEVCKYVAVELKKPLRKRQDTEVIGTVYGILDQKASGVKYTKSDLRLIEVTETICKRLLDYSLHKERTGSXRFAKGMSETFETLHXLVHKGVKVVMDIPYELWNETSAEVADLKKQCDVLVEEFEEVIEDWYRNHQEEDLTEFLCANHVLKGKDTSCLAEQWSGKKGDTAALGGKKSKKKSIRAKAAGGRSSSSKQRKELGGLEGDPSPEEDEGIQKASPLTHSPPDEL

SEQ ID NO: 602 - protein, 40 aa, Homo sapiens
LLSWLLGGTCAVPEAARGNCSARAAGGGTARSFRVRARPG

SEQ ID NO: 603 - protein, 107 aa, Homo sapiens
  SITE (39): Xaa equals any of the naturally occurring L-amino acids
  SITE (88): Xaa equals any of the naturally occurring L-amino acids
EGMPSGCPHPPRGWGLPQGHPAPSFVCCCYSCRLLPWPXCSSSWTSSLPGQLCLPSCRTTALPGNWCLFPSARGWRRGIQSGLPPGGXCTSPRSPPQTLPPAHHTAS

SEQ ID NO: 604 - protein, 26 aa, Homo sapiens
RTTALPGNWCLFPSARGWRRGIQSGL

SEQ ID NO: 605 - protein, 147 aa, Homo sapiens
  SITE (66): Xaa equals any of the naturally occurring L-amino acids
LLSFKIRGLRTEDAGWAQSSSGGLCVRGDAFWMPSSSSGLGSPSRPPSSFLCLLLLLLPPAALALXLFFLDFFPPRAAVSPFLPDHCSARQLVSFPFSTWLAQRNSVRSSSWWFLYQSSITSSNSSTSTSHCFLRSATSAEVSFHSS

SEQ ID NO: 606 - protein, 33 aa, Homo sapiens
AAVSPFLPDHCSARQLVSFPFSTWLAQRNSVRS

SEQ ID NO: 607 - protein, 223 aa, Homo sapiens
  SITE (124): Xaa equals any of the naturally occurring L-amino acids
  SITE (173): Xaa equals any of the naturally occurring L-amino acids
TLGQERNTWGGERTAWATHDGSEFFLGLVSFLGRRGHSQGKEGLKAAGPSRPARAMPLTPQLQNQGSQDRGCWVGSELIRGAVCERGCLLDALILLGAGVSLKATQLLPLFAAATPAACCLGPXALLLGLLPSQGSCVSLLAGPLLCQATGVFSLQHVVGAEEFSQVFLLVVXVPVLDHLLKLFHXXQHITLLLEVSHLCRSLVPQLIGDVHHHLDPFVYQVV

SEQ ID NO: 608 - protein, 26 aa, Homo sapiens
TWGGERTAWATHDGSEFFLGLVSFLG

SEQ ID NO: 609 - protein, 24 aa, Homo sapiens
TAWATHDGSEFFLGLVSFLGRRGH

SEQ ID NO: 610 - protein, 33 aa, Homo sapiens
ARAMPLTPQLQNQGSQDRGCWVGSELIRGAVCE

SEQ ID NO: 611 - protein, 27 aa, Homo sapiens
SQGSCVSLLAGPLLCQATGVFSLQHVV

SEQ ID NO: 612 - protein, 43 aa, Homo sapiens
EPFARGSWIIACTRRGPAAIDLPRACQRPLRHYTTWYTKGSRW

SEQ ID NO: 613 - protein, 31 aa, Homo sapiens
GERLGSPAQQMRRDLRLIEVTENHLQEAPGL

SEQ ID NO: 614 - protein, 10 aa, Homo sapiens
WPRLKGWRRC

SEQ ID NO: 615 - protein, 199 aa, Homo sapiens
MDGQKKNWKDKVVDLLYWRDIKKTGVVFGASLFLLLSLTVFSIVSVTAYIALALLSVTISFRIYKGVIQAIQKSDEGHPFRAYLESEVAISEELVQKYSNSALGHVNCTIKELRRLFLVDDLVDSLKFAVLMWVFTYVGALFNGLTLLILALISLFSVPVIYERHQAQIDHYLGLANKNVKDAMAKIQAKIPGLKRKAE

SEQ ID NO: 616 - protein, 32 aa, Homo sapiens
KNWKDKVVDLLYWRDIKKTGVVFGASLFLLLS

SEQ ID NO: 617 - protein, 26 aa, Homo sapiens
RAYLESEVAISEELVQKYSNSALGHV

SEQ ID NO: 618 - protein, 29 aa, Homo sapiens
LISLFSVPVIYERHQAQIDHYLGLANKNV

SEQ ID NO: 619 - protein, 201 aa, Homo sapiens
QEMDGQKKNWKDKVVDLLYWRDIKKTGVVFGASLFLLLSLTVFSIVSVTAYIALALLSVTISFRIYKGVIQAIQKSDEGHPFRAYLESEVAISEELVQKYSNSALGHVNCTIKELRRLFLVDDLVDSLKFAVLMWVFTYVGALFNGLTLLILALISLFSVPVIYERHQAQIDHYLGLANKNVKDAMAKIQAKIPGLKRKAE

SEQ ID NO: 620 - protein, 34 aa, Homo sapiens
DIKKTGVVFGASLFLLLSLTVFSIVSVTAYIALA

SEQ ID NO: 621 - protein, 28 aa, Homo sapiens
DEGHPFRAYLESEVAISEELVQKYSNSA

SEQ ID NO: 622 - protein, 31 aa, Homo sapiens
NGLTLLILALISLFSVPVIYERHQAQIDHYL

SEQ ID NO: 623 - protein, 15 aa, Homo sapiens
MAVTLSLLLGGRVCA

SEQ ID NO: 624 - protein, 41 aa, Homo sapiens
PSLAVGSRPGGWRAQALLAGSRTPIPTGSRRNGSCRRWRAP

SEQ ID NO: 625 - protein, 56 aa, Homo sapiens; identical to SEQ ID NO: 185

SEQ ID NO: 626 - protein, 302 aa, Homo sapiens
QRPTAEGGLRRHGGYPESLAGRARLRAVTRCGFATRGVAGPGPIGREPDPDSDWEPEERELQEVESTLKRQKQAIRFQKIRRQMEAPGAPPRTLTWEAMEQIRYLHEEFPESWSVPRLAEGFDVSTDVIRRVLKSKFLPTLEQKLKQDQKVLKKAGLAHSLQHLRGSGNTSKLLPAGHSVSGSLLMPGHEASSKDPNHSTALKVIESDTHRTNTPRRRKGRNKEIQDLEESFVPVAAPLGHPRELQKYSSDSESPRGTGSGALPSGQKLEELKAEEPDNFSSKVVQRGREFFDSNGNFLYRI

SEQ ID NO: 627 - protein, 26 aa, Homo sapiens
LAGRARLRAVTRCGFATRGVAGPGPI

SEQ ID NO: 628 - protein, 28 aa, Homo sapiens
APPRTLTWEAMEQIRYLHEEFPESWSVP

SEQ ID NO: 629 - protein, 32 aa, Homo sapiens
QKVLKKAGLAHSLQHLRGSGNTSKLLPAGHSV

SEQ ID NO: 630 - protein, 28 aa, Homo sapiens
PVAAPLGHPRELQKYSSDSESPRGTGSG

SEQ ID NO: 631 - DNA, 481 bp, Homo sapiens
gatgttacacagctctttaataatagtggccatagctgtaataacaatgacaacagtaggtaacggtagtcataccaacagtagggcagtgcattttatattacaactggtttcttgctctagtaggcttggggatgggtgaagacggacagggctggcgcagaccctttccttctcctctccagcccacagtgatctgggcttttacaagacagcctgcttccattcagtagtgtgggaaagttccttcttggcttagcaatacccctgagaccttgttcagtgggctgtgtctctccctgggatgctgggagcaccaagtgtggccgagctagggctgctgacttcctctgggcgcctctgggctgcgagggtctcttataggaattgaggccctttgctgctccaagaaatgctgaggctgtgggcaragggktgtacccaaggggactcttgctctgtgtctgactttggggratcc

SEQ ID NO: 632 - DNA, 58 bp, Homo sapiens
cacagctctttaataatagtggccatagctgtaataacaatgacaacagtaggtaacg

SEQ ID NO: 633 - DNA, 59 bp, Homo sapiens
tgtgtctctccctgggatgctgggagcaccaagtgtggccgagctagggctgctgactt

SEQ ID NO: 634 - DNA, 85 bp, Homo sapiens
gcgagggtctcttataggaattgaggccctttgctgctccaagaaatgctgaggctgtgggcaragggktgtacccaaggggact

SEQ ID NO: 635 - protein, 52 aa, Homo sapiens
  SITE (21): Xaa equals any of the naturally occurring L-amino acids
  SITE (34): Xaa equals any of the naturally occurring L-amino acids
  SITE (36): Xaa equals any of the naturally occurring L-amino acids
CCCPFAVLGAASFLPCPPGDXPKSDTEQESPWVXPXAHSLSISWSSKGPQFL

SEQ ID NO: 636 - protein, 185 aa, Homo sapiens
  SITE (81): Xaa equals any of the naturally occurring L-amino acids
CTNLTSGMWWASLAGAMAAGARAPQEYTPRSQPISTGSTMSGRLSCNAAAPLQCWEPLPSCPAHLGIPQSQTQSKSPLGYXPLPTASAFLGAAKGLNSYKRPSQPRGAQRKSAALARPHLVLPASQGETQPTEQGLRGIAKPRRNFPTLLNGSRLSCKSPDHCGLERRRKGSAPALSVFTHPQAY

SEQ ID NO: 637 - protein, 32 aa, Homo sapiens
  SITE (30): Xaa equals any of the naturally occurring L-amino acids
LQCWEPLPSCPAHLGIPQSQTQSKSPLGYXPL

SEQ ID NO: 638 - protein, 29 aa, Homo sapiens
PTEQGLRGIAKPRRNFPTLLNGSRLSCKS

SEQ ID NO: 639 - protein, 118 aa, Homo sapiens
  SITE (51): Xaa equals any of the naturally occurring L-amino acids
PQLTMPTTCHWSDWYIRGPPLSPWQVSTPPSGMPAHIIFSVTSPWYASSAXHRVLSMTWTDACSSMSDIFPPFCFVKPHPMIQSGVAGVSSSSKKGRQMGLTVPEKVSGNCSFMRAMS

SEQ ID NO: 640 - protein, 31 aa, Homo sapiens
GPPLSPWQVSTPPSGMPAHIIFSVTSPWYAS

SEQ ID NO: 641 - protein, 24 aa, Homo sapiens
CFVKPHPMIQSGVAGVSSSSKKGR

SEQ ID NO: 642 - protein, 70 aa, Homo sapiens
  SITE (23): Xaa equals any of the naturally occurring L-amino acids
  SITE (37): Xaa equals any of the naturally occurring L-amino acids
AVMLLPLCSAGSRFLPALPTWGXPKVRHRARVPLGTXLCPQPQHFLEQQRASIPIRDPRSPEAPRGSQQP

SEQ ID NO: 643 - protein, 36 aa, Homo sapiens
  SITE (14): Xaa equals any of the naturally occurring L-amino acids
  SITE (28): Xaa equals any of the naturally occurring L-amino acids
AGSRFLPALPTWGXPKVRHRARVPLGTXLCPQPQHF

SEQ ID NO: 644 - protein, 16 aa, Homo sapiens
PQDAGKAYSDRHMCSV

SEQ ID NO: 645 - protein, 34 aa, Homo sapiens
MVGPVTLHKKIHTTTVLFIVQIHILLIQAITQAK

SEQ ID NO: 646 - protein, 67 aa, Homo sapiens
LQMHLMILQMTGLSILALLGKSTTTIVEQKFHNGKNQKSGLKENRDKKKQTRWQSTASQKIGITEER

SEQ ID NO: 647 - protein, 101 aa, Homo sapiens
MVGPVTLHKKIHTTTVLFIVQIHILLIQAITQAKLQMHLMILQMTGLSILALLGKSTTTIVEQKFHNGKNQKSGLKENRDKKKQTRWQSTASQKIGITEER

SEQ ID NO: 648 - protein, 600 aa, Homo sapiens
  SITE (471): Xaa equals any of the naturally occurring L-amino acids
GLQKRGDHRHEKMRDAGDPSPPNKMLRRSDSPENKYSDSTGHSKAKNVHTHRVRERDGGTSYSPQENSHNHSALHSSNSHSSNPSNNPSKTSDAPYDSADDWSEHISSSGKKYYYNCRTEVSQWEKPKEWLEREQRQKEANKMAVNSFPKDRDYRREVMQATATSGFASGMEDKHSSDASSLLPQNILSQTSRHNDRDYRLPRAETHSSSTPVQHPIKPVVHPTATPSTVPSSPFTLQSDHQPKKSFDANGASTLSKLPTPTSSVPAQKTERKESTSGDKPVSHSCTTPSTSSASGLNPTSAPPTSASAVPVSPVPQSPIPPLLQDPNLLRQLLPALQATLQLNNSNVDISKINEVLTAAVTQASLQSIIHKFLTAGPSAFNITSLISQAAQLSTQAQPSNQSPMSLTSDASSPRSYVSPRISTPQTNTVPIKPLISTPPVSSQPKVSTPVVKQGPVSQSATQQPVTADKXQGHEPVSPRSLQRSSSQRSPSPGPNHTSNSSNASNATVVPQNSSARSTCSLTPALAAHFSENLIKHVQGWPADHAEKQASRLREEAHNMGTIHMSEICTELKNLRSLVRVCEIQATLREQRDTIFETTN

SEQ ID NO: 649 - protein, 30 aa, Homo sapiens
DAGDPSPPNKMLRRSDSPENKYSDSTGHSK

SEQ ID NO: 650 - protein, 33 aa, Homo sapiens
NHSALHSSNSHSSNPSNNPSKTSDAPYDSADDW

SEQ ID NO: 651 - protein, 35 aa, Homo sapiens
ANKMAVNSFPKDRDYRREVMQATATSGFASGMEDK

SEQ ID NO: 652 - protein, 35 aa, Homo sapiens
VVHPTATPSTVPSSPFTLQSDHQPKKSFDANGAST

SEQ ID NO: 653 - protein, 34 aa, Homo sapiens
SGDKPVSHSCTTPSTSSASGLNPTSAPPTSASAV

SEQ ID NO: 654 - protein, 37 aa, Homo sapiens
ISKINEVLTAAVTQASLQSIIHKFLTAGPSAFNITSL

SEQ ID NO: 655 - protein, 34 aa, Homo sapiens
PGPNHTSNSSNASNATVVPQNSSARSTCSLTPAL

SEQ ID NO: 656 - protein, 30 aa, Homo sapiens
LREEAHNMGTIHMSEICTELKNLRSLVRVC

SEQ ID NO: 657 - protein, 173 aa, Homo sapiens
NSARDKMAVNSFPKDRDYRREVITDMKRCETPEILHHQIKCCGDLIVLKTNTVTAQVTVRPKMCILTELERGMVGPVTLHKKIHTTTVLFIVQIHILLIQAITQAKLQMHLMILQMTGLSILALLGKSTTTIVEQKFHNGKNQKSGLKENRDKKKQTRWQSTASQKIGITEER

SEQ ID NO: 658 - protein, 32 aa, Homo sapiens
VITDMKRCETPEILHHQIKCCGDLIVLKTNTV

SEQ ID NO: 659 - protein, 31 aa, Homo sapiens
TVLFIVQIHILLIQAITQAKLQMHLMILQMT

SEQ ID NO: 660 - protein, 34 aa, Homo sapiens
STTTIVEQKFHNGKNQKSGLKENRDKKKQTRWQS

SEQ ID NO: 661 - protein, 138 aa, Homo sapiens
CKQQPLVGLPVEWKTSIPVMPVVCSHRIFCLKQADTMTETTDCQEQRLTVVLRQYSTPSNQWFIQLLPQALFLLVHLRYSLITSQRNHLMLMEHLLYQNCLHPHLLSLHRKQKEKNLHQETNPYHILAQLLPRLLPLD

SEQ ID NO: 662 - protein, 31 aa, Homo sapiens
SIPVMPVVCSHRIFCLKQADTMTETTDCQEQ

SEQ ID NO: 663 - protein, 29 aa, Homo sapiens
PSNQWFIQLLPQALFLLVHLRYSLITSQR

SEQ ID NO: 664 - protein, 26 aa, Homo sapiens
YQNCLHPHLLSLHRKQKEKNLHQETN

SEQ ID NO: 665 - protein, 74 aa, Homo sapiens
  SITE (35): Xaa equals any of the naturally occurring L-amino acids
MQTCPLVGTLLTRNMDGYTCAVVTSTSFWIISAWXLWKGSPSTSMPTMPETPLRTLCCTKMPSIFSSLMTDGRA

SEQ ID NO: 666 - protein, 78 aa, Homo sapiens; identical to SEQ ID NO: 191

SEQ ID NO: 667 - protein, 25 aa, Homo sapiens
DFIYIYTHTHTHPKSFYIIKLSYYY

SEQ ID NO: 668 - protein, 31 aa, Homo sapiens
VLVCLGKKELIFKKSRLLHPCIFLCMLLKSL

SEQ ID NO: 669 - protein, 41 aa, Homo sapiens
  SITE (26): Xaa equals any of the naturally occurring L-amino acids
  SITE (39): Xaa equals any of the naturally occurring L-amino acids
VMIRFYIYIYTHTHTPQKLLYNQVVXLLLSFGLLREERXNF

SEQ ID NO: 670 - protein, 10 aa, Homo sapiens
ILVDSFKLKL

SEQ ID NO: 671 - protein, 89 aa, Homo sapiens
  SITE (49): Xaa equals any of the naturally occurring L-amino acids
LPFFLIHQVLTPLYLMTCTFRTAEYFPFYPCLHCSITFIQFLYGSSERXDSEDPSLKKQTIKCIHSDQSKKRHIPSPLHTEKFGILRSP

SEQ ID NO: 672 - protein, 23 aa, Homo sapiens
MTCTFRTAEYFPFYPCLHCSITF

SEQ ID NO: 673 - protein, 21 aa, Homo sapiens
SDQSKKRHIPSPLHTEKFGIL

SEQ ID NO: 674 - protein, 71 aa, Homo sapiens
  SITE (26): Xaa equals any of the naturally occurring L-amino acids
MGTRAQVTPGRLPIPPPAPGLPFSAXEPLQGQLRRVSSSRGGFPGLALQLLRSETVKAYVNNEINILASFF

SEQ ID NO: 675 - protein, 40 aa, Homo sapiens
MLVRTRPSQPLPLPGVGLGGPRSGDPPESTELRKGPGFLA

SEQ ID NO: 676 - protein, 29 aa, Homo sapiens
RRVSSSRGGFPGLALQLLRSETVKAYVNN

SEQ ID NO: 677 - protein, 18 aa, Homo sapiens
YIYLIVYISFYSFRPQQL

SEQ ID NO: 678 - protein, 21 aa, Homo sapiens
LRCQLWLWRRSWCTIIHPLFR

SEQ ID NO: 679 - protein, 81 aa, Homo sapiens
  SITE (13): Xaa equals any of the naturally occurring L-amino acids
PQRTVREPQRLIXFQRALSDQCMMISSSLSCGLAKKLTCSCTVSRALAKIMPSFHQWQQPVTGSCQTSPCLSPWKGRQLRS

SEQ ID NO: 680 - protein, 24 aa, Homo sapiens
IMPSFHQWQQPVTGSCQTSPCLSP

SEQ ID NO: 681 - protein, 178 aa, Homo sapiens
NSARARGEIEDGGFSGGGGNADRVVLGEFGVRNVHTTDFPGNYSGYDDAWDQDRFEKNFRVDVVHMDENSLEFDMVGIDAAIANAFRRILLAEVPTMAVEKVLVYNNTSIVQDEILAHRLGLIPIHADPRLFEYRNQGDEEGTEIDTLQFRLQVRCTRNPHAAKDSSDPNELYVNHKG

SEQ ID NO: 682 - protein, 31 aa, Homo sapiens
VLGEFGVRNVHTTDFPGNYSGYDDAWDQDRF

SEQ ID NO: 683 - protein, 36 aa, Homo sapiens
AEVPTMAVEKVLVYNNTSIVQDEILAHRLGLIPIHA

SEQ ID NO: 684 - protein, 23 aa, Homo sapiens
LQFRLQVRCTRNPHAAKDSSDPN

SEQ ID NO: 685 - protein, 65 aa, Homo sapiens
TMDVLLYTRTFSTAIVGTSASRIRRKALAMAASIPTMSNSSEFSSMCTTSTRKFFSKRSWSQASS

SEQ ID NO: 686 - protein, 23 aa, Homo sapiens
TAIVGTSASRIRRKALAMAASIP

SEQ ID NO: 687 - protein, 22 aa, Homo sapiens
PTMSNSSEFSSMCTTSTRKFFS

SEQ ID NO: 688 - protein, 62 aa, Homo sapiens
IRHELVERLKMAASQAVEEMRTAWFWGSLGFAMSILLTFPVTIPVMMMPGTRTASRRISVWM

SEQ ID NO: 689 - protein, 21 aa, Homo sapiens
VERLKMAASQAVEEMRTAWFW

SEQ ID NO: 690 - protein, 25 aa, Homo sapiens
SILLTFPVTIPVMMMPGTRTASRRI

SEQ ID NO: 691 - protein, 168 aa, Homo sapiens
  SITE (57): Xaa equals any of the naturally occurring L-amino acids
  SITE (81): Xaa equals any of the naturally occurring L-amino acids
TTKADLFPEGTIRPVHDDILIAQLRPGQEIDLLMHCVKGIGKDHAKFSPVATASYRXLPDITLLEPVEGEAAEELSRCFSXGVIEVQEVQGKKVARVANPRLDTFSREIFRNEKLKKVVRLARVRDHYIFSVESTGVLPPDVLVSEAIKVLMGKCRRFLDELDAVQMD

SEQ ID NO: 692 - protein, 23 aa, Homo sapiens
PEGTIRPVHDDILIAQLRPGQEI

SEQ ID NO: 693 - protein, 23 aa, Homo sapiens
  SITE (13): Xaa equals any of the naturally occurring L-amino acids
AKFSPVATASYRXLPDITLLEPV

SEQ ID NO: 694 - protein, 20 aa, Homo sapiens
KLKKVVRLARVRDHYIFSVE

SEQ ID NO: 695 - protein, 25 aa, Homo sapiens
DVLVSEAIKVLMGKCRRFLDELDAV

SEQ ID NO: 696 - protein, 262 aa, Homo sapiens
  SITE (97): Xaa equals any of the naturally occurring L-amino acids
  SITE (106): Xaa equals any of the naturally occurring L-amino acids
  SITE (245): Xaa equals any of the naturally occurring L-amino acids
  SITE (260): Xaa equals any of the naturally occurring L-amino acids
MCPVCGRALSSPGSLGRHLLIHSEDQRSNCAVCGARFTSHATFNSEKLPEVLNMESLPTVHNEGPSSAEGKDIAFSPPVYPAGILLVCNNCAAYRKXLEAQTPSVXKWALRRQNEPLEVRLQRLERERTAKKSRRDNETPEEREVRRMRDREAKRLQRMQETDEQRARRLQRDREAMRLKRANETPEKRQARLIREREAKRLKRRLEKMDMMLRAQFGQDPSAMAALAAEMNFFQLPVSGVELDXQLLGKMAFEEQNSSXLH

SEQ ID NO: 697 - protein, 9 aa, Homo sapiens
IWNPYPQST

SEQ ID NO: 698 - protein, 34 aa, Homo sapiens
TLPVSPLPARLRDREQLIAHVYQHTAAVVSAKSY

SEQ ID NO: 699 - protein, 22 aa, Homo sapiens
SSPGSLGRHLLIHSEDQRSNCA

SEQ ID NO: 700 - protein, 24 aa, Homo sapiens
FNSEKLPEVLNMESLPTVHNEGPS

SEQ ID NO: 701 - protein, 24 aa, Homo sapiens
  SITE (17): Xaa equals any of the naturally occurring L-amino acids
PAGILLVCNNCAAYRKXLEAQTPS

SEQ ID NO: 702 - protein, 22 aa, Homo sapiens
LEVRLQRLERERTAKKSRRDNE

SEQ ID NO: 703 - protein, 23 aa, Homo sapiens
EAKRLQRMQETDEQRARRLQRDR

SEQ ID NO: 704 - protein, 23 aa, Homo sapiens
KRQARLIREREAKRLKRRLEKMD

SEQ ID NO: 705 - protein, 23 aa, Homo sapiens
PLPARLRDREQLIAHVYQHTAAV

SEQ ID NO: 706 - protein, 100 aa, Homo sapiens
  SITE (68): Xaa equals any of the naturally occurring L-amino acids
  SITE (69): Xaa equals any of the naturally occurring L-amino acids
  SITE (83): Xaa equals any of the naturally occurring L-amino acids
ARSLLTPSSCSHMQGLLRSTCNKPRPASGSKDRASWVAAALVLVAVGVGGWVGRWEGGQAGGCGSVQXXAVLLFKGHLAQKLXVQLHPTYRQLEEVHFSC

SEQ ID NO: 707 - protein, 31 aa, Homo sapiens
PASGSKDRASWVAAALVLVAVGVGGWVGRWE

SEQ ID NO: 708 - protein, 121 aa, Homo sapiens
  SITE (110): Xaa equals any of the naturally occurring L-amino acids
  SITE (119): Xaa equals any of the naturally occurring L-amino acids
ARNIMSIFSSLLLSRLASRSRMSRACRFSGVSLARFSLMASRSRCSRRARCSSVSCMRCKRLASRSLMRLTSRSSGVSLSRRLFLAVRSRSSRCSRTSKGSFCRRRAHLXTLGVWASSXLR

SEQ ID NO: 709 - protein, 31 aa, Homo sapiens
RCKRLASRSLMRLTSRSSGVSLSRRLFLAVR

SEQ ID NO: 710 - protein, 190 aa, Homo sapiens
  SITE (164): Xaa equals any of the naturally occurring L-amino acids
MDHSHHMGMSYMDSNSTMQPSHHHPTTSASHSHGGGDSSMMMMPMTFYFGFKNVELLFSGLVINTAGEMAGAFVAVFLLAMFYEGLKIARESLLRKSQVSIRYNSMPVPGPNGTILMETHKTVGQQMLSFPHLLQTVLHIIQVVISYFLMLIFMTYNGYLCIAXAAGAGTGYFLFSWKKAVVVDITEHCH

SEQ ID NO: 711 - protein, 22 aa, Homo sapiens
GMSYMDSNSTMQPSHHHPTTSA

SEQ ID NO: 712 - protein, 26 aa, Homo sapiens
GDSSMMMMPMTFYFGFKNVELLFSGL

SEQ ID NO: 713 - protein, 30 aa, Homo sapiens
VFLLAMFYEGLKIARESLLRKSQVSIRYNS

SEQ ID NO: 714 - protein, 27 aa, Homo sapiens
VPGPNGTILMETHKTVGQQMLSFPHLL

SEQ ID NO: 715 - protein, 26 aa, Homo sapiens
  SITE (12): Xaa equals any of the naturally occurring L-amino acids
FMTYNGYLCIAXAAGAGTGYFLFSWK

SEQ ID NO: 716 - protein, 18 aa, Homo sapiens
  SITE (14): Xaa equals any of the naturally occurring L-amino acids
ACARAPGLTWRGKXQRVK

SEQ ID NO: 717 - protein, 203 aa, Homo sapiens
  SITE (9): Xaa equals any of the naturally occurring L-amino acids
  SITE (162): Xaa equals any of the naturally occurring L-amino acids
CGTSHQGCXHHGPAQATSWLCLPLPPQAHRSSGVLSGLAFILGQLQVTTSGRGGKRSQDTGQSEGHTPPTVLERGLHVSAPGGPGQGGEDWGWGGGWTLQVLGPVVNREAKSLICSEAAAASPLNRHSKHLPAMPLCRRDANSDKGGQDGPQTRHPIFTLCXFPLQVSPGALAQAQEGREAMQSDHTGPSALRAWAPRAEFGT

SEQ ID NO: 718 - protein, 28 aa, Homo sapiens
LSGLAFILGQLQVTTSGRGGKRSQDTGQ

SEQ ID NO: 719 - protein, 28 aa, Homo sapiens
CSEAAAASPLNRHSKHLPAMPLCRRDAN

SEQ ID NO: 720 - protein, 26 aa, Homo sapiens
PGALAQAQEGREAMQSDHTGPSALRA

SEQ ID NO: 721 - protein, 14 aa, Homo sapiens
GVSGEFHDEHLDLA

SEQ ID NO: 722 - protein, 123 aa, Homo sapiens
  SITE (12): Xaa equals any of the naturally occurring L-amino acids
  SITE (32): Xaa equals any of the naturally occurring L-amino acids
  SITE (34): Xaa equals any of the naturally occurring L-amino acids
  SITE (36): Xaa equals any of the naturally occurring L-amino acids
  SITE (40): Xaa equals any of the naturally occurring L-amino acids
MVQPCGACAKTXWKACSSCCSSPCCLQERWPXPXAXCPEXGPSSHPGIQALCAVAVVYLSPSSRLDWSLAPLFVPSLAAGETPLTQPAWALTTNTLGHGQPAQDRLPALGHCAPISVLGLGSS

SEQ ID NO: 723 - protein, 44 aa, Homo sapiens
  SITE (14): Xaa equals any of the naturally occurring L-amino acids
  SITE (30): Xaa equals any of the naturally occurring L-amino acids
KCVLCGGVQVAGLXPPAAPGAAGLPLHPPXPGEQSKWLVIVMTV

SEQ ID NO: 724 - protein, 20 aa, Homo sapiens
QKEISTSWWHCYTAAACTRT

SEQ ID NO: 725 - protein, 74 aa, Homo sapiens
  SITE (20): Xaa equals any of the naturally occurring L-amino acids
  SITE (36): Xaa equals any of the naturally occurring L-amino acids
APCRWLKMCPLWRSTGGWPXSSCCSWSCWSASSPSXAWRTEQVAGDRDDSHESPGSRPELGLHGPGGSHGRGPQ

SEQ ID NO: 726 - protein, 28 aa, Homo sapiens
  SITE (5): Xaa equals any of the naturally occurring L-amino acids
SSPSXAWRTEQVAGDRDDSHESPGSRPE

SEQ ID NO: 727 - protein, 25 aa, Homo sapiens
  SITE (1): Xaa equals any of the naturally occurring L-amino acids
XGPSSHPGIQALCAVAVVYLSPSSR

SEQ ID NO: 728 - protein, 29 aa, Homo sapiens
PLTQPAWALTTNTLGHGQPAQDRLPALGH

SEQ ID NO: 729 - protein, 14 aa, Homo sapiens
SELGQGHCEWAAPN

SEQ ID NO: 730 - protein, 75 aa, Homo sapiens
LQYGPIPGSTHASGEMQIKTVKCHFHFLDWQRVLCILLTVLNISSKQQMVSKYELRNLREMISLFQPADSFLQPV

SEQ ID NO: 731 - protein, 34 aa, Homo sapiens
EMQIKTVKCHFHFLDWQRVLCILLTVLNISSKQQ

SEQ ID NO: 732 - protein, 92 aa, Homo sapiens
  SITE (17): Xaa equals any of the naturally occurring L-amino acids
  SITE (36): Xaa equals any of the naturally occurring L-amino acids
HVKVKPMAELPPQHTGXQTGSCCLTFLNGLQPHLPXSVLRTMKLWSSLWTHHTTRRSKAMVTHPRVGPEENKALVLILTLTLSQDFDTEPKS

SEQ ID NO: 733 - protein, 28 aa, Homo sapiens
LWTHHTTRRSKAMVTHPRVGPEENKALV

SEQ ID NO: 734 - protein, 147 aa, Homo sapiens
  SITE (55): Xaa equals any of the naturally occurring L-amino acids
  SITE (96): Xaa equals any of the naturally occurring L-amino acids
  SITE (109): Xaa equals any of the naturally occurring L-amino acids
  SITE (127): Xaa equals any of the naturally occurring L-amino acids
IKVFTGDAHVSSSLCLYPTFIPTVLMVALSISPFSIPRYLPRNKPKSYYMLWHAXMMSSDEQPKPQGRDAFVKQDLWNITCESKAHGRTPSSAHGXADRKLLPHLPQWXTATSPQVSLKDNETLVFXVDTPHYQALQSHGDPPSGGS

SEQ ID NO: 735 - protein, 26 aa, Homo sapiens
FIPTVLMVALSISPFSIPRYLPRNKP

SEQ ID NO: 736 - protein, 24 aa, Homo sapiens
PKPQGRDAFVKQDLWNITCESKAH

SEQ ID NO: 737 - protein, 26 aa, Homo sapiens
  SITE (13): Xaa equals any of the naturally occurring L-amino acids
QVSLKDNETLVFXVDTPHYQALQSHG

1. An isolated nucleic acid molecule comprising a polynucleotide having a nucleotide sequence at least 95% identical to a sequence selected from the group consisting of:
(a) a polynucleotide fragment of SEQ ID NO:X or a polynucleotide fragment of the cDNA sequence included in ATCC Deposit No:Z, which is hybridizable to SEQ ID NO:X;
(b) a polynucleotide encoding a polypeptide fragment of SEQ ID NO:Y or a polypeptide fragment encoded by the cDNA sequence included in ATCC Deposit No:Z, which is hybridizable to SEQ ID NO:X;
(c) a polynucleotide encoding a polypeptide domain of SEQ ID NO:Y or a polypeptide domain encoded by the cDNA sequence included in ATCC Deposit No:Z, which is hybridizable to SEQ ID NO:X;
(d) a polynucleotide encoding a polypeptide epitope of SEQ ID NO:Y or a polypeptide epitope encoded by the cDNA sequence included in ATCC Deposit No:Z, which is hybridizable to SEQ ID NO:X;
(e) a polynucleotide encoding a polypeptide of SEQ ID NO:Y or the cDNA sequence included in ATCC Deposit No:Z, which is hybridizable to SEQ ID NO:X, having biological activity;
(f) a polynucleotide which is a variant of SEQ ID NO:X;
(g) a polynucleotide which is an allelic variant of SEQ ID NO:X;
(h) a polynucleotide which encodes a species homologue of the SEQ ID NO:Y;
(i) a polynucleotide capable of hybridizing under stringent conditions to any one of the polynucleotides specified in (a)-(h),
wherein said polynucleotide does not hybridize under stringent conditions to a nucleic acid molecule having a nucleotide sequence of only a residues or of only T residues.

2. The isolated nucleic acid molecule of claim 1, wherein the polynucleotide fragment comprises a nucleotide sequence encoding a secreted protein.

3. The isolated nucleic acid molecule of claim 1, wherein the polynucleotide fragment comprises a nucleotide sequence encoding the sequence identified as SEQ ID NO:Y or the polypeptide encoded by the cDNA sequence included in ATCC Deposit No:Z, which is hybridizable to SEQ ID NO:X.

4. The isolated nucleic acid molecule of claim 1, wherein the polynucleotide fragment comprises the entire nucleotide sequence of SEQ ID NO:X or the cDNA sequence included in ATCC Deposit No:Z, which is hybridizable to SEQ ID NO:X.

5. The isolated nucleic acid molecule of claim 2, wherein the nucleotide sequence comprises sequential nucleotide deletions from either the C-terminus or the N-terminus.

6. The isolated nucleic acid molecule of claim 3, wherein the nucleotide sequence comprises sequential nucleotide deletions from either the C-terminus or the N-terminus.

7. A recombinant vector comprising the isolated nucleic acid molecule of claim 1.

8. A method of making a recombinant host cell comprising the isolated nucleic acid molecule of claim 1.

9. A recombinant host cell produced by the method of claim 8.

10. The recombinant host cell of claim 9 comprising vector sequences.

11. An isolated polypeptide comprising an amino acid sequence at least 95% identical to a sequence selected from the group consisting of:
(a) a polypeptide fragment of SEQ ID NO:Y or the encoded sequence included in ATCC Deposit No:Z;
(b) a polypeptide fragment of SEQ ID NO:Y or the encoded sequence included in ATCC Deposit No:Z, having biological activity;
(c) a polypeptide domain of SEQ ID NO:Y or the encoded sequence included in ATCC Deposit No:Z;
(d) a polypeptide epitope of SEQ ID NO:Y or the encoded sequence included in ATCC Deposit No:Z;
(e) a secreted form of SEQ ID NO:Y or the encoded sequence included in ATCC Deposit No:Z;
(f) a full length protein of SEQ ID NO:Y or the encoded sequence included in ATCC Deposit No:Z;
(g) a variant of SEQ ID NO:Y;
(h) an allelic variant of SEQ ID NO:Y; or
(i) a species homologue of the SEQ ID NO:Y.

12. The isolated polypeptide of claim 11, wherein the secreted form or the full length protein comprises sequential amino acid deletions from either the C-terminus or the N-terminus.

13. An isolated antibody that binds specifically to the isolated polypeptide of claim 11.

14. A recombinant host cell that expresses the isolated polypeptide of claim 11.

15. A method of making an isolated polypeptide comprising:
(a) culturing the recombinant host cell of claim 14 under conditions such that said polypeptide is expressed; and
(b) recovering said polypeptide.

16. The polypeptide produced by claim 15.

17. A method for preventing, treating, or ameliorating a medical condition, comprising administering to a mammalian subject a therapeutically effective amount of the polynucleotide of claim 1.

18. A method of diagnosing a pathological condition or a susceptibility to a pathological condition in a subject comprising:
(a) determining the presence or absence of a mutation in the polynucleotide of claim 1; and
(b) diagnosing a pathological condition or a susceptibility to a pathological condition based on the presence or absence of said mutation.

19. A method of diagnosing a pathological condition or a susceptibility to a pathological condition in a subject comprising:
(a) determining the presence or amount of expression of the polypeptide of claim 11 in a biological sample; and
(b) diagnosing a pathological condition or a susceptibility to a pathological condition based on the presence or amount of expression of the polypeptide.

20. A method for preventing, treating, or ameliorating a medical condition, comprising administering to a mammalian subject a therapeutically effective amount of the polypeptide of claim 11.
